(19) United States
(12) Patent Application Publication
(10) Pub. No.: US 2024/0002477 A1
(43) Pub. Date: Jan. 4, 2024

(54) POLYPEPTIDES FOR DETECTION AND TREATMENT OF CORONAVIRUS INFECTION

(71) Applicants: The University of Chicago, Chicago, IL (US); Wisconsin Alumni Research Foundation, Madison, WI (US)

(72) Inventors: Patrick WILSON, Chicago, IL (US); Haley DUGAN, Chicago, IL (US); Christopher STAMPER, Chicago, IL (US); Yoshihiro KAWAOKA, Madison, WI (US); Peter HALFMANN, Madison, WI (US)

(73) Assignees: The University of Chicago, Chicago, IL (US); Wisconsin Alumni Research Foundation, Madison, WI (US)

(21) Appl. No.: 18/255,609

(22) PCT Filed: Dec. 3, 2021
(86) PCT No.: PCT/US21/72723

§ 371 Date: Jun. 2, 2023

Related U.S. Application Data
(60) Provisional application No. 63/121,384, filed on Dec. 4, 2020.

(51) Int. Cl. C07K 16/10; G01N 33/569; A61P 31/14

(52) U.S. Cl. CPC C07K 16/1003; G01N 33/56983; A61P 31/14; G01N 2333/165; G01N 2469/10; C07K 2317/92; C07K 2317/76; A61K 2039/505

(57) ABSTRACT

To address the need in the art, the inventors have comprehensively characterized the SARS-CoV-2-specific B cell repertoire in convalescent COVID-19 patients and generated mAbs against the spike, ORF8, and NP proteins. Together, the inventors' data reveal key insight into antigen specificity and B cell subset distribution upon SARS-CoV-2 infection in the context of age, sex, and disease severity. Aspects of the disclosure relate to novel antibody and antigen binding fragments. Further aspects relate to polypeptides comprising the antigen binding fragment(s) of the disclosure, and compositions comprising the polypeptides, antibodies, and/or antigen binding fragments of the disclosure. Also described are nucleic acids encoding an antibody or antigen binding fragment of the disclosure.

### CROSS-REFERENCE TO RELATED APPLICATIONS

[0001] This application claims the benefit of priority of U.S. Provisional Patent Application No. 63/121,384 filed Dec. 4, 2020, which is hereby incorporated by reference in its entirety.

### STATEMENT OF GOVERNMENT SUPPORT

[0002] This invention was made with government support under contract numbers 75N93019C00062 and 75N93019C00051 awarded by the National Institutes of Health. The government has certain rights in the invention.

### SEQUENCE LISTING

[0003] The instant application contains a Sequence Listing which has been submitted in ASCII format and is hereby incorporated by reference in its entirety. Said ASCII copy, created on Nov. 24, 2021, is named ARCDP0715WO_ST25.txt and is 1,359,473 bytes in size.

### BACKGROUND

### I. Field of the Invention

[0004] Aspects of the invention relate to at least the fields of virology and molecular biology.

### II. Background

[0005] Since the emergence of SARS-CoV-2 in December 2019, the World Health Organization has reported spread to over 200 countries with infections approaching 64 million and deaths 1.5 million worldwide. Despite this burden, the quest to identify effective vaccines, therapies, and protective biomarkers continues. The isolation of human monoclonal antibodies (mAbs) specific for immunogenic SARS-CoV-2 proteins holds immense potential, as they can be rapidly employed as therapeutic agents, diagnostic reagents, and aid vaccine optimization. Several independent groups have identified potently neutralizing mAbs against the SARS-CoV-2 spike protein, the major immunogenic surface glycoprotein 1-7. Despite these advances, there have been no mAbs isolated against other immunogenic targets of SARS-CoV-2, including the internal nucleoprotein (NP) and open reading frame (ORF) protein, which have been suggested to induce antibody responses and immunomodulatory effects in humans 8-12. Moreover, the properties and frequencies of B cell subsets targeting distinct SARS-CoV-2 antigens remain poorly understood, and are likely shaped by clinical features such as age and disease severity^{6,13,14}. Therefore, there is a need in the art for effective therapies against SARS-CoV-2.

### SUMMARY

[0006] To address the need for new treatments, the inventors have comprehensively characterized the SARS-CoV-2-specific B cell repertoire in convalescent COVID-19 patients and generated mAbs against the spike, ORFS, and NP proteins. Together, the inventors' data reveal key insights into antigen specificity and B cell subset distribution upon SARS-CoV-2 infection in the context of age, sex, and disease severity. Aspects of the disclosure relate to novel antibody and antigen binding fragments, as well as methods of using these fragments. Further aspects relate to polypeptides comprising the antigen binding fragment(s) of the disclosure, and compositions comprising the polypeptides, antibodies, and/or antigen binding fragments of the disclosure. Also described are nucleic acids encoding an antibody or antigen binding fragment of the disclosure. The disclosure also relates to nucleic acids encoding an antibody heavy chain, wherein the nucleic acid has at least 60, 61, 62, 63, 64, 65, 66, 67, 68, 69, 70, 71, 72, 73, 74, 75, 76, 77, 78, 79, 80, 81, 82, 83, 84, 85, 86, 87, 88, 89, 90, 91, 92, 93, 94, 95, 96, 97, 98, 99, or 100% (or any derivable range therein) sequence identity to one of SEQ ID NOS:1621-1710 or 2707-2755. Also described are nucleic acids encoding an antibody light chain of the disclosure, wherein the nucleic acid has at least 60, 61, 62, 63, 64, 65, 66, 67, 68, 69, 70, 71, 72, 73, 74, 75, 76, 77, 78, 79, 80, 81, 82, 83, 84, 85, 86, 87, 88, 89, 90, 91, 92, 93, 94, 95, 96, 97, 98, 99, or 100% (or any derivable range therein) sequence identity to one of SEQ ID NOS:1711-1800 or 2756-2804. Further aspects relate to vectors or expression vectors comprising nucleic acids of the disclosure and host cells comprising polypeptides, nucleic acids, vectors, antibodies, or antigen binding fragments of the disclosure. The nucleic acids of the disclosure may be DNA or RNA.

[0007] Also described is a method of a making a cell comprising transferring one or more nucleic acid(s) of the disclosure into a cell. In some embodiments, the method further comprises culturing the cell under conditions that allow for expression of a polypeptide from the nucleic acid. In some embodiments, the method further comprising isolating the expressed polypeptide. The cell may be further defined as a human cell, B cell, T cell, Chinese hamster ovary, NS0 murine myeloma cell, PER.C6 cell, or a cell described herein.

[0008] Further aspects of the disclosure relate to a method for treating or preventing a coronavirus infection in a subject, the method comprising administering to the subject an antibody, antigen binding fragment, polypeptide, nucleic acid, or host cell of the disclosure. Yet further aspects relate to a method for evaluating a sample from a subject, the method comprising contacting a biological sample from the subject, or extract thereof, with at least one antibody, antigen binding fragment, or polypeptide of the disclosure. Also disclosed is a method for diagnosing a SARS-CoV-2 infection in a subject, the method comprising contacting a biological sample from the subject, or extract thereof, with at least one antibody, antigen binding fragment, or polypeptide of any one of the disclosure. In some aspects, the compositions of the disclosure are formulated as a vaccine for the treatment or prevention of a coronoavirus infection. In some embodiments, the antibodies, antigen binding fragments, or compositions of the disclosure are used in a vaccine for preventing coronaviral infections in a subject that does not have a coronaviral infection. In some embodiments, the antibodies, antigen binding fragments, or compositions of the disclosure are used to treat a subject having a coronaviral infection.

[0009] Also described is a method of a making a cell comprising transferring one or more nucleic acid(s) of the disclosure into a cell. In some aspects, the method further comprises culturing the cell under conditions that allow for expression of a polypeptide from the nucleic acid. In some aspects, the method further comprising isolating the expressed polypeptide. Aspects describe a method for producing a polypeptide comprising transferring one or more nucleic acid(s) or vector(s) of the disclosure into a cell and isolating polypeptides expressed from the nucleic acid. The cell may be further defined as a human cell, B cell, T cell, Chinese hamster ovary, NS0 murine myeloma cell, PER.C6 cell, or a cell described herein.

[0010] Further aspects of the disclosure relate to a method for treating or preventing a coronavirus infection in a subject, the method comprising administering to the subject an antibody, antigen binding fragment, polypeptide, nucleic acid, or host cell of the disclosure. Yet further aspects relate to a method for evaluating a sample from a subject, the method comprising contacting a biological sample from the subject, or extract thereof, with at least one antibody, antigen binding fragment, or polypeptide of the disclosure. Also disclosed is a method for diagnosing a SARS-CoV-2 infection in a subject, the method comprising contacting a biological sample from the subject, or extract thereof, with at least one antibody, antigen binding fragment, or polypeptide of any one of the disclosure. In some aspects, the compositions of the disclosure are formulated as a vaccine for the treatment or prevention of a coronoavirus infection. In some aspects, the antibodies, antigen binding fragments, or compositions of the disclosure are used in a vaccine for preventing coronaviral infections in a subject that does not have a coronaviral infection. In some aspects, the antibodies, antigen binding fragments, or compositions of the disclosure are used to treat a subject having a coronavirus infection.

[0011] Aspects of the disclosure relate to an antibody or antigen binding fragment comprising a heavy chain variable region and a light chain variable region, wherein the heavy chain variable region comprises a HCDR1, HCDR2, and HCDR3 from a heavy chain variable region of an antibody clone of Table 1 and wherein the light chain variable region comprises a LCDR1, LCDR2, and LCDR3 from the light chain variable region of the same clone of Table 1. Further aspects relate to an antibody or antigen binding fragment comprising a heavy chain variable region and a light chain variable region, wherein the heavy chain variable region comprises a HCDR1, HCDR2, and HCDR3 having or having at least 80% sequence identity or having or having at least 60, 61, 62, 63, 64, 65, 66, 67, 68, 69, 70, 71, 72, 73, 74, 75, 76, 77, 78, 79, 80, 81, 82, 83, 84, 85, 86, 87, 88, 89, 90, 91, 92, 93, 94, 95, 96, 97, 98, 99, or 100% (or any derivable range therein) sequence identity with a HCDR1, HCDR2, and HCDR3 from a heavy chain variable region of an antibody clone of Table 1 and wherein the light chain variable region comprises a LCDR1, LCDR2, and LCDR3 having or having at least 80% sequence identity or having or having at least 60, 61, 62, 63, 64, 65, 66, 67, 68, 69, 70, 71, 72, 73, 74, 76, 77, 78, 79, 80, 81, 82, 83, 84, 85, 86, 87, 88, 89, 90, 91, 92, 93, 94, 95, 96, 97, 98, 99, or 100% (or any derivable range therein) sequence identity with a LCDR1, LCDR2, and LCDR3 from the light chain variable region of the same clone of Table 1. The HCDR1, HCDR2, HCDR3, LCDR1, LCDR2, and/or LCDR3 may be determined from the variable region sequences by methods known in the art. In some aspects, the CDR is HCDR1, HCDR2, HCDR3, LCDR1, LCDR2, and/or LCDR3 determined by the Chothia method. In some aspects, the CDR is HCDR1, HCDR2, HCDR3, LCDR1, LCDR2, and/or LCDR3 determined by the Kabat method. In some aspects, the CDR is HCDR1, HCDR2, HCDR3, LCDR1, LCDR2, and/or LCDR3 determined by the IMGT method.

[0012] Aspects of the disclosure relate to an antibody or antigen binding fragment in which the HCDR1, HCDR2, HCDR2, LCDR1, LCDR2, and LCDR3 each comprise an amino acid sequence that has at least 80% sequence identity to an HCDR1, HCDR2, HCDR2, LCDR1, LCDR2, and LCDR3 of Table 1, wherein the HCDR1, HCDR2, HCDR2, LCDR1, LCDR2, and LCDR3 are from the same antibody clone. In some aspects, the HCDR1, HCDR2, HCDR2, LCDR1, LCDR2, and LCDR3 each comprise an amino acid sequence that has or has at least 60, 61, 62, 63, 64, 65, 66, 67, 68, 69, 70, 71, 72, 73, 74, 75, 76, 77, 78, 79, 80, 81, 82, 83, 84, 85, 86, 87, 88, 89, 90, 91, 92, 93, 94, 95, 96, 97, 98, 99, or 100% (or any derivable range therein) sequence identity to an HCDR1, HCDR2, HCDR2, LCDR1, LCDR2, and LCDR3 of Table 1, wherein the HCDR1, HCDR2, HCDR2, LCDR1, LCDR2, and LCDR3 are from the same antibody clone. In some aspects, the HCDR1, HCDR2, HCDR2, LCDR1, LCDR2, and LCDR3 each comprise the amino acid sequence of an HCDR1, HCDR2, HCDR2, LCDR1, LCDR2, and LCDR3 of Table 1, wherein the HCDR1, HCDR2, HCDR2, LCDR1, LCDR2, and LCDR3 are from the same antibody clone.

[0013] Aspects of the disclosure relate to an antibody or antigen binding fragment comprising a heavy chain variable region and a light chain variable region, wherein the heavy chain variable region comprises a HCDR1, HCDR2, and HCDR3 having at least 60, 61, 62, 63, 64, 65, 66, 67, 68, 69, 70, 71, 72, 73, 74, 75, 76, 77, 78, 79, 80, 81, 82, 83, 84, 85, 86, 87, 88, 89, 90, 91, 92, 93, 94, 95, 96, 97, 98, 99, or 100% (or any derivable range therein) sequence identity to the HCDR1, HCR2, HCR3 from a heavy chain variable region of a antibody clone of Table 1 and wherein the light chain variable region comprises a LCDR1, LCDR2, and LCDR3 having or having at least 60, 61, 62, 63, 64, 65, 66, 67, 68, 69, 70, 71, 72, 73, 74, 75, 76, 77, 78, 79, 80, 81, 82, 83, 84, 85, 86, 87, 88, 89, 90, 91, 92, 93, 94, 95, 96, 97, 98, 99, or 100% (or any derivable range therein) sequence identity to the LCDR1, LCDR2, and LCDR3 from the light chain variable region of the same antibody clone of Table 1. In some aspects, the antibody or antigen binding fragment comprises a heavy chain variable region and a light chain variable region, wherein the heavy chain variable region comprises a HCDR1, HCDR2, and HCDR3 having or having at least 80% sequence identity to the HCDR1, HCR2, HCR3 from a heavy chain variable region of a antibody clone of Table 1 and wherein the light chain variable region comprises a LCDR1, LCDR2, and LCDR3 having at least 80% sequence identity to the LCDR1, LCDR2, and LCDR3 from the light chain variable region of the same antibody clone of Table 1. In some aspects, the heavy chain variable region comprises a HCDR1, HCDR2, and HCDR3 having the amino acid sequence of an of a HCDR1, HCDR2, and HCDR3 of a clone of Table 1 and the light chain variable region comprises a LCDR1, LCDR2, and LCDR3 comprising the amino acid sequence of the LCDR1, LCDR2, and LCDR3 from the light chain variable region of the same clone of Table 1.

[0014] The polypeptides of the disclosure may comprise at least two antigen binding fragments, wherein each antigen binding fragment is independently selected from an antigen binding fragment of the disclosure. In some aspects, the polypeptide is multivalent. In some aspects, the polypeptide is multispecific. In some aspects, the polypeptide is bispecific. In some aspects, the polypeptide comprises, comprises at least, or comprises at most 1, 2, 3, 4, 5, 6, 7, 8, 9, or 10 antigen binding regions. Each antigen binding region may be independently selected from an antigen binding region of the disclosure. In some aspects, the polypeptide may have repeated units of the same antigen binding region, such as at least, at most, or exactly 1, 2, 3, 4, 5, 6, 7, 8, 9, or 10 repeated units.

[0015] In some aspects, the heavy chain variable region comprises an amino acid sequence with at least 80% sequence identity to a heavy chain variable region of an antibody clone of Table 1 and/or the light chain variable region comprises an amino acid sequence with at least 80% sequence identity to the light chain variable region of the same antibody clone of Table 1. In some aspects, the heavy chain variable region comprises an amino acid sequence having or having at least 60, 61, 62, 63, 64, 65, 66, 67, 68, 69, 70, 71, 72, 73, 74, 75, 76, 77, 78, 79, 80, 81, 82, 83, 84, 85, 86, 87, 88, 89, 90, 91, 92, 93, 94, 95, 96, 97, 98, 99, or 100% (or any derivable range therein) sequence identity to a heavy chain variable region of an antibody clone of Table 1 and/or the light chain variable region comprises an amino acid sequence having or having at least 60, 61, 62, 63, 64, 65, 66, 67, 68, 69, 70, 71, 72, 73, 74, 75, 76, 77, 78, 79, 80, 81, 82, 83, 84, 85, 86, 87, 88, 89, 90, 91, 92, 93, 94, 95, 96, 97, 98, 99, or 100% (or any derivable range therein) sequence identity to the light chain variable region of the same antibody clone of Table 1. In some aspects, the heavy chain variable region comprises the amino acid sequence of a heavy chain variable region of an antibody clone of Table 1 and/or the light chain variable region comprises the amino acid sequence of the same antibody clone of Table 1. In some aspects, the antibody or antigen binding fragment comprises a heavy chain framework region (HFR) 1, HFR2, HFR3, and HFR4 and light chain framework region (LFR) 1, LFR2, LFR3, and LFR4, and wherein the HFR1, HFR2, HFR3, and HFR4 comprises an amino acid sequence with at least 80% sequence identity to an HFR1, HFR2, HFR3, and HFR4, respectively, of an antibody clone of Table 1, and the LFR1, LFR2, LFR3, and LFR4 comprises an amino acid sequence with at least 80% sequence identity to the LFR1, LFR2, LFR3, and LFR4, respectively, of the same antibody clone of Table 1. In some aspects, the antibody or antigen binding fragment comprises a heavy chain framework region (HFR) 1, HFR2, HFR3, and HFR4 and light chain framework region (LFR) 1, LFR2, LFR3, and LFR4, and wherein the HFR1, HFR2, HFR3, and HFR4 comprises an amino acid sequence having or having at least 60, 61, 62, 63, 64, 65, 66, 67, 68, 69, 70, 71, 72, 73, 74, 75, 76, 77, 78, 79, 80, 81, 82, 83, 84, 85, 86, 87, 88, 89, 90, 91, 92, 93, 94, 95, 96, 97, 98, 99, or 100% (or any derivable range therein) sequence identity to an HFR1, HFR2, HFR3, and HFR4, respectively, of an antibody clone of Table 1, and the LFR1, LFR2, LFR3, and LFR4 comprises an amino acid sequence having or having at least 60, 61, 62, 63, 64, 65, 66, 67, 68, 69, 70, 71, 72, 73, 74, 75, 76, 77, 78, 79, 80, 81, 82, 83, 84, 85, 86, 87, 88, 89, 90, 91, 92, 93, 94, 95, 96, 97, 98, 99, or 100% (or any derivable range therein) sequence identity to the LFR1, LFR2, LFR3, and LFR4, respectively, of the same antibody clone of Table 1. In some aspects, the HFR1, HFR2, HFR3, and HFR4 comprises the amino acid sequence of an HFR1, HFR2, HFR3, and HFR4, respectively, of an antibody clone of Table 1, and the LFR1, LFR2, LFR3, and LFR4 comprises the amino acid sequence of the LFR1, LFR2, LFR3, and LFR4, respectively, of the same antibody clone of Table 1. In some aspects, the antibody or antigen binding fragment comprises a heavy chain and a light chain and wherein the heavy chain comprises an amino acid sequence with at least 70% sequence identity to a heavy chain of an antibody clone of Table 1 and the light chain comprises an amino acid sequence with at least 70% sequence identity to the light chain of the same antibody clone of Table 1. In some aspects, the antibody or antigen binding fragment comprises a heavy chain and a light chain and wherein the heavy chain comprises an amino acid sequence having or having at least 60, 61, 62, 63, 64, 65, 66, 67, 68, 69, 70, 71, 72, 73, 74, 75, 76, 77, 78, 79, 80, 81, 82, 83, 84, 85, 86, 87, 88, 89, 90, 91, 92, 93, 94, 95, 96, 97, 98, 99, or 100% (or any derivable range therein) sequence identity to a heavy chain of an antibody clone of Table 1 and the light chain comprises an amino acid sequence having or having at least 60, 61, 62, 63, 64, 65, 66, 67, 68, 69, 70, 71, 72, 73, 74, 75, 76, 77, 78, 79, 80, 81, 82, 83, 84, 85, 86, 87, 88, 89, 90, 91, 92, 93, 94, 95, 96, 97, 98, 99, or 100% (or any derivable range therein) sequence identity to the light chain of the same antibody clone of Table 1. In some aspects, the antibody or antigen binding fragment comprises a heavy chain and a light chain and wherein the heavy chain comprises the amino acid sequence of an antibody clone of Table 1 and the light chain comprises the amino acid sequence of the same antibody clone of Table 1.

[0016] In some aspects, the heavy chain variable region comprises a heavy chain framework region that has or has at least 80% sequence identity to a heavy chain framework region of an antibody clone of Table 1 and the light chain variable region comprises a light chain framework region that has or has at least 80% sequence identity to a light chain framework region of the same antibody clone of Table 1. In some aspects, the heavy chain variable region comprises a heavy chain framework region having or having at least 60, 61, 62, 63, 64, 65, 66, 67, 68, 69, 70, 71, 72, 73, 74, 75, 76, 77, 78, 79, 80, 81, 82, 83, 84, 85, 86, 87, 88, 89, 90, 91, 92, 93, 94, 95, 96, 97, 98, 99, or 100% (or any derivable range therein) sequence identity to a heavy chain framework region of an antibody clone of Table 1 and the light chain variable region comprises a light chain framework region having or having at least 60, 61, 62, 63, 64, 65, 66, 67, 68, 69, 70, 71, 72, 73, 74, 75, 76, 77, 78, 79, 80, 81, 82, 83, 84, 85, 86, 87, 88, 89, 90, 91, 92, 93, 94, 95, 96, 97, 98, 99, or 100% (or any derivable range therein) sequence identity to a light chain framework region of the same antibody clone of Table 1.

[0017] In some aspects, the heavy chain variable region comprises at least 70% sequence identity to the heavy chain variable region of an antibody clone of Table 1 and the light chain variable region comprises at least 70% sequence identity to the light chain variable region of the same antibody clone of Table 1, and wherein the heavy chain and light chain comprise 100% sequence identity to each of the three heavy chain CDRs and three light chain CDRs from the same antibody clone of Table 1. In some aspects, the heavy chain variable region comprises at least 75% sequence identity to the heavy chain variable region of an antibody clone of Table 1 and the light chain variable region comprises at least 75% sequence identity to the light chain variable region of the same antibody clone of Table 1, and wherein the heavy chain and light chain comprise 100% sequence identity to each of the three heavy chain CDRs and three light chain CDRs from the same antibody clone of Table 1. In some aspects, the heavy chain variable region comprises at least 80% sequence identity to the heavy chain variable region of an antibody clone of Table 1 and the light chain variable region comprises at least 80% sequence identity to the light chain variable region of the same antibody clone of Table 1, and wherein the heavy chain and light chain comprise 100% sequence identity to each of the three heavy chain CDRs and three light chain CDRs from the same antibody clone of Table 1 In some aspects, the heavy chain variable region comprises at least 85% sequence identity to the heavy chain variable region of an antibody clone of Table 1 and the light chain variable region comprises at least 85% sequence identity to the light chain variable region of the same antibody clone of Table 1, and wherein the heavy chain and light chain comprise 100% sequence identity to each of the three heavy chain CDRs and three light chain CDRs from the same antibody clone of Table 1. In some aspects, the heavy chain variable region comprises at least 90% sequence identity to the heavy chain variable region of an antibody clone of Table 1 and the light chain variable region comprises at least 90% sequence identity to the light chain variable region of the same antibody clone of Table 1, and wherein the heavy chain and light chain comprise 100% sequence identity to each of the three heavy chain CDRs and three light chain CDRs from the same antibody clone of Table 1. In some aspects, the heavy chain variable region comprises at least 95% sequence identity to the heavy chain variable region of an antibody clone of Table 1 and the light chain variable region comprises at least 95% sequence identity to the light chain variable region of the same antibody clone of Table 1, and wherein the heavy chain and light chain comprise 100% sequence identity to each of the three heavy chain CDRs and three light chain CDRs from the same antibody clone of Table 1.

[0018] The antibody or antigen binding fragment of the disclosure may be human, chimeric, or humanized. In some aspects, the antibody, or antigen binding fragment binds a SARS-CoV-2 Spike, NP protein, or ORF8 with a kD of about 10⁻⁶ nM to about 10⁻¹² pM. In some aspects, the antibody, or antigen binding fragment binds a SARS-CoV-2 Spike, NP protein, or ORFS with a kD of about, a kD of at least, or a kD of at most 10⁻³, 10⁻⁴, 10⁻⁵, 10⁻⁶, 10⁻⁷, 10⁻⁸, 10⁻⁹, 10⁻¹⁰, 10⁻¹¹, 10⁻¹², 10⁻¹³, 10⁻¹⁴, 10⁻¹⁵, 10⁻¹⁶, 10⁻¹⁷, or 10⁻¹⁸ (or any derivable range therein) μM, nM, or pM. In some aspects, the antibody or antigen binding fragment specifically binds to a receptor-binding domain (RBD) of the SARS-CoV-2 spike protein. The antibody may be further defined as a neutralizing antibody. In some aspects, the antibody or antigen binding fragment is further defined as a human antibody or antigen binding fragment, humanized antibody or antigen binding fragment, recombinant antibody or antigen binding fragment, chimeric antibody or antigen binding fragment, an antibody or antigen binding fragment derivative, a veneered antibody or antigen binding fragment, a diabody, a monoclonal antibody or antigen binding fragment, a single domain antibody, or a single chain antibody. In some aspects, the antigen binding fragment is further defined as a single chain variable fragment (scFv), F(ab′)2, Fab′, Fab, Fv, or rIgG. In some aspects, the antibody, antigen binding fragment, or polypeptide is operatively linked to a detectable label. Detectable labels are described herein.

[0019] Aspects of the disclosure also relate to multi-specific and/or multivalent antibodies and polypeptides. Accordingly, aspects relate to bivalent or bispecific antibodies that comprise two antigen binding fragments, wherein the antigen binding fragment is two of the same antigen binding fragments or two different antigen binding fragments described herein. The disclosure also provides for multi-specific polypeptides. Aspects relate to polypeptides comprising or comprising at least 2, 3, 4, 5, or 6 antigen binding fragments.

[0020] The antigen binding fragment may be at least 2, 3, 4, 5, or 6 scFv, F(ab′)2, Fab′, Fab, Fv, or rIgG, or combinations thereof. The polypeptide and/or antigen binding fragments of the disclosure may comprise a linker between a heavy chain and light chain variable region or between antigen binding fragments. The linker may be a flexible linker. Exemplary flexible linkers include glycine polymers (G)n, glycine-serine polymers (including, for example, (GS)n, (GSGGS-SEQ ID NO:2805)n, (G4S)n and (GGGS-SEQ ID NO:2806)n, where n is an integer of at least one. In some aspects, n is at least, at most, or exactly 1, 2, 3, 4, 5, 6, 7, 8, 9, or 10 (or any derivable range therein). Glycine-alanine polymers, alanine-serine polymers, and other flexible linkers known in the art and may be used as a linker in the polypeptides of the disclosure. Exemplary linkers can comprise or consist of GGSG (SEQ ID NO:2807), GGSGG (SEQ ID NO:2808), GSGSG (SEQ ID NO:2809), GSGGG (SEQ ID NO:2810), GGGSG (SEQ ID NO:2811), GSGSG (SEQ ID NO:2812), and the like.

[0021] In some aspects, the coronavirus infection is a SARS-CoV-2 infection. In some aspects, the coronavirus infection is a SARS-CoV infection. In some aspects, the coronavirus infection is a MERS-CoV infection. In some aspects, the coronavirus infection is a HCoV-HCoV-HKU1, HCoV-229E, or HCoV-NL63 infection.

[0022] Compositions of the disclosure, such as pharmaceutical compositions may comprise a pharmaceutical excipient, carrier, or molecule described herein. In some aspects, the composition further comprises an adjuvant or an immunostimulator. Such adjuvants or immunostimulators may include, but are not limited to stimulators of pattern recognition receptors, such as Toll-like receptors, RIG-1 and NOD-like receptors (NLR), mineral salts, such as alum, alum combined with monphosphoryl lipid (MPL) A of Enterobacteria, such as Escherichia coli, Salmonella minnesota, Salmonella typhimurium, or Shigella flexneri or specifically with MPL (ASO4), MPL A of above-mentioned bacteria separately, saponins, such as QS-21, Quil-A, ISCOMs, ISCOMATRIX, emulsions such as MF59, Montanide, ISA 51 and ISA 720, AS02 (QS21+squalene+MPL.), liposomes and liposomal formulations such as ASO1, synthesized or specifically prepared microparticles and microcarriers such as bacteria-derived outer membrane vesicles (OMV) of N. gonorrheae, Chlamydia trachomatis and others, or chitosan particles, depot-forming agents, such as Pluronic block co-polymers, specifically modified or prepared peptides, such as muramyl dipeptide, aminoalkyl glucosaminide 4-phosphates, such as RC529, or proteins, such as bacterial toxoids or toxin fragments. Compositions may comprise more than one antibody and/or antigen binding fragment of the disclosure. Accordingly, compositions of the disclosure may comprise, may comprise at least, or may comprise at most 1, 2, 3, 4, 5, 6, 7, 8, 9, or 10 antibodies and/or antigen binding fragments of the disclosure. The compositions of the disclosure may be formulated for a route of administration described herein. In some aspects, the composition, antibody, antigen binding fragment, or polypeptide is formulated for parenteral, intravenous, subcutaneous, intramuscular, or intranasal administration. In a particular aspect, the compositions is formulated for intranasal administration.

[0023] In some aspects, the host cell is a human cell, B cell, T cell, Chinese hamster ovary, NS0 murine myeloma cell, or PER.C6 cell. In some aspects, the host cell is a cell type or cell population described herein.

[0024] In aspects of the disclosure, the subject or patient may be a human subject or a human patient. In some aspects, the subject or patient is a non-human animal. In some aspects, the non-human animal is a bat, monkey, camel, rat, mouse, rabbit, goat, chicken, bird, cat, or dog. The subject may further be defined as an at-risk subject. At-risk subjects include health care workers, immunocompromised subjects, people over the age of 65, or those with at least one or at least two underlying conditions. Example of underlying conditions include obesity, high blood pressure, autoimmunity, cancer, and asthma. In some aspects, the subject has one or more symptoms of a coronavirus infection. Symptoms of a coronavirus infection include, but are not limited to elevated temperature or a fever of 100.0° F. or more, loss of taste or smell, cough, difficulty breathing, shortness of breath, fatigue, headache, chills, sore throat, congestion or runny nose, shaking or exaggerated shivering, significant muscle pain or ache, diarrhea, and/or nausea or vomiting. In some aspects, the subject does not have any symptoms of a coronavirus infection. In some aspects, the subject has been diagnosed with a coronavirus infection. In some aspects, the subject has not been diagnosed with a coronavirus infection. In some aspects, the subject has been previously treated for a coronavirus infection. In some aspects, the subject has been previously vaccinated for coronavirus. In some aspects, the subject has not been previously vaccinated for coronavirus. In some aspects, the previous treatment comprises a pain reliever, such as acetaminophen or ibuprofen, a steroid such as dexamethasone, prednisolone, beclomethasone, fluticasone, or methylprednisone or an antiviral such as remdesivir. In some aspects, the subject is administered an additional therapeutic. The additional therapeutic may comprise one or more of a pain reliever, such as acetaminophen or ibuprofen, a steroid such as dexamethasone, prednisolone, beclomethasone, fluticasone, or methylprednisone or an antiviral such as remdesivir. In some aspects, the additional therapeutic comprises dexamethasone. In some aspects, the additional therapeutic comprises remdesivir.

[0025] In some aspects of the disclosure, the method further comprises incubating the antibody, antigen binding fragment, or polypeptide under conditions that allow for the binding of the antibody, antigen binding fragment, or polypeptide to antigens in the biological sample or extract thereof. In some aspects, the method further comprises detecting the binding of an antigen to the antibody, antigen binding fragment, or polypeptide. In some aspects, the method further comprises contacting the biological sample with at least one capture antibody, antigen, or polypeptide. The at least one capture antibody, antigen binding fragment, or polypeptide may be an antibody, polypeptide, or antigen binding fragment of the disclosure. In some aspects, the capture antibody is linked or operatively linked to a solid support. The term “operatively linked” refers to a situation where two components are combined or capable of combining to form a complex. For example, the components may be covalently attached and/or on the same polypeptide, such as in a fusion protein or the components may have a certain degree of binding affinity for each other, such as a binding affinity that occurs through van der Waals forces. In some aspects, the biological sample comprises a blood sample, urine sample, fecal sample, or nasopharyngeal sample. In aspects of the disclosure, the at least one antibody, antigen binding fragment, or polypeptide may be operatively linked to a detectable label. In some aspects, the method further comprises incubating the antibody, antigen binding fragment, or polypeptide under conditions that allow for the binding of the antibody, antigen binding fragment, or polypeptide to antigens in the biological sample or extract thereof. In some aspects, the method further comprises detecting the binding of an antigen to the antibody, antigen binding fragment, or polypeptide. In some aspects, the method further comprises contacting the biological sample with at least one capture antibody, antigen, or polypeptide. In some aspects, the biological sample comprises a blood sample, urine sample, fecal sample, or nasopharyngeal sample.

[0026] Aspects of the disclosure relate to an antibody, antigen binding fragment, or polypeptide comprising a heavy chain variable region having a HCDR1, HCDR2, and HCDR3, and a light chain variable region having a LCDR1, LCDR2, and LCDR3, wherein the HCDR1, HCDR2, and HCDR3 comprises an amino acid sequence of SEQ ID NOS:3-5, respectively and the LCDR1, LCDR2, and LCDR3 comprises an amino acid sequence of SEQ ID NOS:12-14, respectively.

[0027] Aspects of the disclosure relate to an antibody, antigen binding fragment, or polypeptide comprising a heavy chain variable region having a HCDR1, HCDR2, and HCDR3, and a light chain variable region having a LCDR1, LCDR2, and LCDR3, wherein the HCDR1, HCDR2, and HCDR3 comprises an amino acid sequence of SEQ ID NOS:21-23, respectively and the LCDR1, LCDR2, and LCDR3 comprises an amino acid sequence of SEQ ID NOS:30-32, respectively.

[0028] Aspects of the disclosure relate to an antibody, antigen binding fragment, or polypeptide comprising a heavy chain variable region having a HCDR1, HCDR2, and HCDR3, and a light chain variable region having a LCDR1, LCDR2, and LCDR3, wherein the HCDR1, HCDR2, and HCDR3 comprises an amino acid sequence of SEQ ID NOS:39-41, respectively and the LCDR1, LCDR2, and LCDR3 comprises an amino acid sequence of SEQ ID NOS:48-respectively.

[0029] Aspects of the disclosure relate to an antibody, antigen binding fragment, or polypeptide comprising a heavy chain variable region having a HCDR1, HCDR2, and HCDR3, and a light chain variable region having a LCDR1, LCDR2, and LCDR3, wherein the HCDR1, HCDR2, and HCDR3 comprises an amino acid sequence of SEQ ID NOS:57-59, respectively and the LCDR1, LCDR2, and LCDR3 comprises an amino acid sequence of SEQ ID NOS:66-68, respectively.

[0030] Aspects of the disclosure relate to an antibody, antigen binding fragment, or polypeptide comprising a heavy chain variable region having a HCDR1, HCDR2, and HCDR3, and a light chain variable region having a LCDR1, LCDR2, and LCDR3, wherein the HCDR1, HCDR2, and HCDR3 comprises an amino acid sequence of SEQ ID NOS:75-77, respectively and the LCDR1, LCDR2, and LCDR3 comprises an amino acid sequence of SEQ ID NOS:84-86, respectively.

[0031] Aspects of the disclosure relate to an antibody, antigen binding fragment, or polypeptide comprising a heavy chain variable region having a HCDR1, HCDR2, and HCDR3, and a light chain variable region having a LCDR1, LCDR2, and LCDR3, wherein the HCDR1, HCDR2, and HCDR3 comprises an amino acid sequence of SEQ ID NOS:93-95, respectively and the LCDR1, LCDR2, and LCDR3 comprises an amino acid sequence of SEQ ID NOS:102-104, respectively.

[0032] Aspects of the disclosure relate to an antibody, antigen binding fragment, or polypeptide comprising a heavy chain variable region having a HCDR1, HCDR2, and HCDR3, and a light chain variable region having a LCDR1, LCDR2, and LCDR3, wherein the HCDR1, HCDR2, and HCDR3 comprises an amino acid sequence of SEQ ID NOS:111-113, respectively and the LCDR1, LCDR2, and LCDR3 comprises an amino acid sequence of SEQ ID NOS:120-122, respectively.

[0033] Aspects of the disclosure relate to an antibody, antigen binding fragment, or polypeptide comprising a heavy chain variable region having a HCDR1, HCDR2, and HCDR3, and a light chain variable region having a LCDR1, LCDR2, and LCDR3, wherein the HCDR1, HCDR2, and HCDR3 comprises an amino acid sequence of SEQ ID NOS:129-131, respectively and the LCDR1, LCDR2, and LCDR3 comprises an amino acid sequence of SEQ ID NOS:138-140, respectively.

[0034] Aspects of the disclosure relate to an antibody, antigen binding fragment, or polypeptide comprising a heavy chain variable region having a HCDR1, HCDR2, and HCDR3, and a light chain variable region having a LCDR1, LCDR2, and LCDR3, wherein the HCDR1, HCDR2, and HCDR3 comprises an amino acid sequence of SEQ ID NOS:147-149, respectively and the LCDR1, LCDR2, and LCDR3 comprises an amino acid sequence of SEQ ID NOS:156-158, respectively.

[0035] Aspects of the disclosure relate to an antibody, antigen binding fragment, or polypeptide comprising a heavy chain variable region having a HCDR1, HCDR2, and HCDR3, and a light chain variable region having a LCDR1, LCDR2, and LCDR3, wherein the HCDR1, HCDR2, and HCDR3 comprises an amino acid sequence of SEQ ID NOS:165-167, respectively and the LCDR1, LCDR2, and LCDR3 comprises an amino acid sequence of SEQ ID NOS:174-176, respectively.

[0036] Aspects of the disclosure relate to an antibody, antigen binding fragment, or polypeptide comprising a heavy chain variable region having a HCDR1, HCDR2, and HCDR3, and a light chain variable region having a LCDR1, LCDR2, and LCDR3, wherein the HCDR1, HCDR2, and HCDR3 comprises an amino acid sequence of SEQ ID NOS:183-185, respectively and the LCDR1, LCDR2, and LCDR3 comprises an amino acid sequence of SEQ ID NOS:192-194, respectively.

[0037] Aspects of the disclosure relate to an antibody, antigen binding fragment, or polypeptide comprising a heavy chain variable region having a HCDR1, HCDR2, and HCDR3, and a light chain variable region having a LCDR1, LCDR2, and LCDR3, wherein the HCDR1, HCDR2, and HCDR3 comprises an amino acid sequence of SEQ ID NOS:201-203, respectively and the LCDR1, LCDR2, and LCDR3 comprises an amino acid sequence of SEQ ID NOS:210-212, respectively.

[0038] Aspects of the disclosure relate to an antibody, antigen binding fragment, or polypeptide comprising a heavy chain variable region having a HCDR1, HCDR2, and HCDR3, and a light chain variable region having a LCDR1, LCDR2, and LCDR3, wherein the HCDR1, HCDR2, and HCDR3 comprises an amino acid sequence of SEQ ID NOS:219-221, respectively and the LCDR1, LCDR2, and LCDR3 comprises an amino acid sequence of SEQ ID NOS:228-230, respectively.

[0039] Aspects of the disclosure relate to an antibody, antigen binding fragment, or polypeptide comprising a heavy chain variable region having a HCDR1, HCDR2, and HCDR3, and a light chain variable region having a LCDR1, LCDR2, and LCDR3, wherein the HCDR1, HCDR2, and HCDR3 comprises an amino acid sequence of SEQ ID NOS:237-239, respectively and the LCDR1, LCDR2, and LCDR3 comprises an amino acid sequence of SEQ ID NOS:246-248, respectively.

[0040] Aspects of the disclosure relate to an antibody, antigen binding fragment, or polypeptide comprising a heavy chain variable region having a HCDR1, HCDR2, and HCDR3, and a light chain variable region having a LCDR1, LCDR2, and LCDR3, wherein the HCDR1, HCDR2, and HCDR3 comprises an amino acid sequence of SEQ ID NOS:255-257, respectively and the LCDR1, LCDR2, and LCDR3 comprises an amino acid sequence of SEQ ID NOS:264-266, respectively.

[0041] Aspects of the disclosure relate to an antibody, antigen binding fragment, or polypeptide comprising a heavy chain variable region having a HCDR1, HCDR2, and HCDR3, and a light chain variable region having a LCDR1, LCDR2, and LCDR3, wherein the HCDR1, HCDR2, and HCDR3 comprises an amino acid sequence of SEQ ID NOS:273-275, respectively and the LCDR1, LCDR2, and LCDR3 comprises an amino acid sequence of SEQ ID NOS:282-284, respectively.

[0042] Aspects of the disclosure relate to an antibody, antigen binding fragment, or polypeptide comprising a heavy chain variable region having a HCDR1, HCDR2, and HCDR3, and a light chain variable region having a LCDR1, LCDR2, and LCDR3, wherein the HCDR1, HCDR2, and HCDR3 comprises an amino acid sequence of SEQ ID NOS:291-293, respectively and the LCDR1, LCDR2, and LCDR3 comprises an amino acid sequence of SEQ ID NOS:300-302, respectively.

[0043] Aspects of the disclosure relate to an antibody, antigen binding fragment, or polypeptide comprising a heavy chain variable region having a HCDR1, HCDR2, and HCDR3, and a light chain variable region having a LCDR1, LCDR2, and LCDR3, wherein the HCDR1, HCDR2, and HCDR3 comprises an amino acid sequence of SEQ ID NOS:309-311, respectively and the LCDR1, LCDR2, and LCDR3 comprises an amino acid sequence of SEQ ID NOS:318-320, respectively.

[0044] Aspects of the disclosure relate to an antibody, antigen binding fragment, or polypeptide comprising a heavy chain variable region having a HCDR1, HCDR2, and HCDR3, and a light chain variable region having a LCDR1, LCDR2, and LCDR3, wherein the HCDR1, HCDR2, and HCDR3 comprises an amino acid sequence of SEQ ID NOS:327-329, respectively and the LCDR1, LCDR2, and LCDR3 comprises an amino acid sequence of SEQ ID NOS:336-338, respectively.

[0045] Aspects of the disclosure relate to an antibody, antigen binding fragment, or polypeptide comprising a heavy chain variable region having a HCDR1, HCDR2, and HCDR3, and a light chain variable region having a LCDR1, LCDR2, and LCDR3, wherein the HCDR1, HCDR2, and HCDR3 comprises an amino acid sequence of SEQ ID NOS:345-347, respectively and the LCDR1, LCDR2, and LCDR3 comprises an amino acid sequence of SEQ ID NOS:354-356, respectively.

[0046] Aspects of the disclosure relate to an antibody, antigen binding fragment, or polypeptide comprising a heavy chain variable region having a HCDR1, HCDR2, and HCDR3, and a light chain variable region having a LCDR1, LCDR2, and LCDR3, wherein the HCDR1, HCDR2, and HCDR3 comprises an amino acid sequence of SEQ ID NOS:363-365, respectively and the LCDR1, LCDR2, and LCDR3 comprises an amino acid sequence of SEQ ID NOS:372-374, respectively.

[0047] Aspects of the disclosure relate to an antibody, antigen binding fragment, or polypeptide comprising a heavy chain variable region having a HCDR1, HCDR2, and HCDR3, and a light chain variable region having a LCDR1, LCDR2, and LCDR3, wherein the HCDR1, HCDR2, and HCDR3 comprises an amino acid sequence of SEQ ID NOS:381-383, respectively and the LCDR1, LCDR2, and LCDR3 comprises an amino acid sequence of SEQ ID NOS:390-392, respectively.

[0048] Aspects of the disclosure relate to an antibody, antigen binding fragment, or polypeptide comprising a heavy chain variable region having a HCDR1, HCDR2, and HCDR3, and a light chain variable region having a LCDR1, LCDR2, and LCDR3, wherein the HCDR1, HCDR2, and HCDR3 comprises an amino acid sequence of SEQ ID NOS:399-401, respectively and the LCDR1, LCDR2, and LCDR3 comprises an amino acid sequence of SEQ ID NOS:408-410, respectively.

[0049] Aspects of the disclosure relate to an antibody, antigen binding fragment, or polypeptide comprising a heavy chain variable region having a HCDR1, HCDR2, and HCDR3, and a light chain variable region having a LCDR1, LCDR2, and LCDR3, wherein the HCDR1, HCDR2, and HCDR3 comprises an amino acid sequence of SEQ ID NOS:417-419, respectively and the LCDR1, LCDR2, and LCDR3 comprises an amino acid sequence of SEQ ID NOS:426-428, respectively.

[0050] Aspects of the disclosure relate to an antibody, antigen binding fragment, or polypeptide comprising a heavy chain variable region having a HCDR1, HCDR2, and HCDR3, and a light chain variable region having a LCDR1, LCDR2, and LCDR3, wherein the HCDR1, HCDR2, and HCDR3 comprises an amino acid sequence of SEQ ID NOS:435-437, respectively and the LCDR1, LCDR2, and LCDR3 comprises an amino acid sequence of SEQ ID NOS:444-446, respectively.

[0051] Aspects of the disclosure relate to an antibody, antigen binding fragment, or polypeptide comprising a heavy chain variable region having a HCDR1, HCDR2, and HCDR3, and a light chain variable region having a LCDR1, LCDR2, and LCDR3, wherein the HCDR1, HCDR2, and HCDR3 comprises an amino acid sequence of SEQ ID NOS:453-455, respectively and the LCDR1, LCDR2, and LCDR3 comprises an amino acid sequence of SEQ ID NOS:462-464, respectively.

[0052] Aspects of the disclosure relate to an antibody, antigen binding fragment, or polypeptide comprising a heavy chain variable region having a HCDR1, HCDR2, and HCDR3, and a light chain variable region having a LCDR1, LCDR2, and LCDR3, wherein the HCDR1, HCDR2, and HCDR3 comprises an amino acid sequence of SEQ ID NOS:471-473, respectively and the LCDR1, LCDR2, and LCDR3 comprises an amino acid sequence of SEQ ID NOS:480-482, respectively.

[0053] Aspects of the disclosure relate to an antibody, antigen binding fragment, or polypeptide comprising a heavy chain variable region having a HCDR1, HCDR2, and HCDR3, and a light chain variable region having a LCDR1, LCDR2, and LCDR3, wherein the HCDR1, HCDR2, and HCDR3 comprises an amino acid sequence of SEQ ID NOS:489-491, respectively and the LCDR1, LCDR2, and LCDR3 comprises an amino acid sequence of SEQ ID NOS:498-500, respectively.

[0054] Aspects of the disclosure relate to an antibody, antigen binding fragment, or polypeptide comprising a heavy chain variable region having a HCDR1, HCDR2, and HCDR3, and a light chain variable region having a LCDR1, LCDR2, and LCDR3, wherein the HCDR1, HCDR2, and HCDR3 comprises an amino acid sequence of SEQ ID NOS:507-509, respectively and the LCDR1, LCDR2, and LCDR3 comprises an amino acid sequence of SEQ ID NOS:516-518, respectively.

[0055] Aspects of the disclosure relate to an antibody, antigen binding fragment, or polypeptide comprising a heavy chain variable region having a HCDR1, HCDR2, and HCDR3, and a light chain variable region having a LCDR1, LCDR2, and LCDR3, wherein the HCDR1, HCDR2, and HCDR3 comprises an amino acid sequence of SEQ ID NOS:525-527, respectively and the LCDR1, LCDR2, and LCDR3 comprises an amino acid sequence of SEQ ID NOS:534-536, respectively.

[0056] Aspects of the disclosure relate to an antibody, antigen binding fragment, or polypeptide comprising a heavy chain variable region having a HCDR1, HCDR2, and HCDR3, and a light chain variable region having a LCDR1, LCDR2, and LCDR3, wherein the HCDR1, HCDR2, and HCDR3 comprises an amino acid sequence of SEQ ID NOS:543-545, respectively and the LCDR1, LCDR2, and LCDR3 comprises an amino acid sequence of SEQ ID NOS:552-554, respectively.

[0057] Aspects of the disclosure relate to an antibody, antigen binding fragment, or polypeptide comprising a heavy chain variable region having a HCDR1, HCDR2, and HCDR3, and a light chain variable region having a LCDR1, LCDR2, and LCDR3, wherein the HCDR1, HCDR2, and HCDR3 comprises an amino acid sequence of SEQ ID NOS:561-563, respectively and the LCDR1, LCDR2, and LCDR3 comprises an amino acid sequence of SEQ ID NOS:570-572, respectively.

[0058] Aspects of the disclosure relate to an antibody, antigen binding fragment, or polypeptide comprising a heavy chain variable region having a HCDR1, HCDR2, and HCDR3, and a light chain variable region having a LCDR1, LCDR2, and LCDR3, wherein the HCDR1, HCDR2, and HCDR3 comprises an amino acid sequence of SEQ ID NOS:579-581, respectively and the LCDR1, LCDR2, and LCDR3 comprises an amino acid sequence of SEQ ID NOS:588-590, respectively.

[0059] Aspects of the disclosure relate to an antibody, antigen binding fragment, or polypeptide comprising a heavy chain variable region having a HCDR1, HCDR2, and HCDR3, and a light chain variable region having a LCDR1, LCDR2, and LCDR3, wherein the HCDR1, HCDR2, and HCDR3 comprises an amino acid sequence of SEQ ID NOS:597-599, respectively and the LCDR1, LCDR2, and LCDR3 comprises an amino acid sequence of SEQ ID NOS:606-608, respectively.

[0060] Aspects of the disclosure relate to an antibody, antigen binding fragment, or polypeptide comprising a heavy chain variable region having a HCDR1, HCDR2, and HCDR3, and a light chain variable region having a LCDR1, LCDR2, and LCDR3, wherein the HCDR1, HCDR2, and HCDR3 comprises an amino acid sequence of SEQ ID NOS:615-617, respectively and the LCDR1, LCDR2, and LCDR3 comprises an amino acid sequence of SEQ ID NOS:624-626, respectively.

[0061] Aspects of the disclosure relate to an antibody, antigen binding fragment, or polypeptide comprising a heavy chain variable region having a HCDR1, HCDR2, and HCDR3, and a light chain variable region having a LCDR1, LCDR2, and LCDR3, wherein the HCDR1, HCDR2, and HCDR3 comprises an amino acid sequence of SEQ ID NOS:633-635, respectively and the LCDR1, LCDR2, and LCDR3 comprises an amino acid sequence of SEQ ID NOS:642-644, respectively.

[0062] Aspects of the disclosure relate to an antibody, antigen binding fragment, or polypeptide comprising a heavy chain variable region having a HCDR1, HCDR2, and HCDR3, and a light chain variable region having a LCDR1, LCDR2, and LCDR3, wherein the HCDR1, HCDR2, and HCDR3 comprises an amino acid sequence of SEQ ID NOS:651-653, respectively and the LCDR1, LCDR2, and LCDR3 comprises an amino acid sequence of SEQ ID NOS:660-662, respectively.

[0063] Aspects of the disclosure relate to an antibody, antigen binding fragment, or polypeptide comprising a heavy chain variable region having a HCDR1, HCDR2, and HCDR3, and a light chain variable region having a LCDR1, LCDR2, and LCDR3, wherein the HCDR1, HCDR2, and HCDR3 comprises an amino acid sequence of SEQ ID NOS:669-671, respectively and the LCDR1, LCDR2, and LCDR3 comprises an amino acid sequence of SEQ ID NOS:678-680, respectively.

[0064] Aspects of the disclosure relate to an antibody, antigen binding fragment, or polypeptide comprising a heavy chain variable region having a HCDR1, HCDR2, and HCDR3, and a light chain variable region having a LCDR1, LCDR2, and LCDR3, wherein the HCDR1, HCDR2, and HCDR3 comprises an amino acid sequence of SEQ ID NOS:687-689, respectively and the LCDR1, LCDR2, and LCDR3 comprises an amino acid sequence of SEQ ID NOS:696-698, respectively.

[0065] Aspects of the disclosure relate to an antibody, antigen binding fragment, or polypeptide comprising a heavy chain variable region having a HCDR1, HCDR2, and HCDR3, and a light chain variable region having a LCDR1, LCDR2, and LCDR3, wherein the HCDR1, HCDR2, and HCDR3 comprises an amino acid sequence of SEQ ID NOS:705-707, respectively and the LCDR1, LCDR2, and LCDR3 comprises an amino acid sequence of SEQ ID NOS:714-716, respectively.

[0066] Aspects of the disclosure relate to an antibody, antigen binding fragment, or polypeptide comprising a heavy chain variable region having a HCDR1, HCDR2, and HCDR3, and a light chain variable region having a LCDR1, LCDR2, and LCDR3, wherein the HCDR1, HCDR2, and HCDR3 comprises an amino acid sequence of SEQ ID NOS:723-725, respectively and the LCDR1, LCDR2, and LCDR3 comprises an amino acid sequence of SEQ ID NOS:732-734, respectively.

[0067] Aspects of the disclosure relate to an antibody, antigen binding fragment, or polypeptide comprising a heavy chain variable region having a HCDR1, HCDR2, and HCDR3, and a light chain variable region having a LCDR1, LCDR2, and LCDR3, wherein the HCDR1, HCDR2, and HCDR3 comprises an amino acid sequence of SEQ ID NOS:741-743, respectively and the LCDR1, LCDR2, and LCDR3 comprises an amino acid sequence of SEQ ID NOS:750-752, respectively.

[0068] Aspects of the disclosure relate to an antibody, antigen binding fragment, or polypeptide comprising a heavy chain variable region having a HCDR1, HCDR2, and HCDR3, and a light chain variable region having a LCDR1, LCDR2, and LCDR3, wherein the HCDR1, HCDR2, and HCDR3 comprises an amino acid sequence of SEQ ID NOS:759-761, respectively and the LCDR1, LCDR2, and LCDR3 comprises an amino acid sequence of SEQ ID NOS:768-770, respectively.

[0069] Aspects of the disclosure relate to an antibody, antigen binding fragment, or polypeptide comprising a heavy chain variable region having a HCDR1, HCDR2, and HCDR3, and a light chain variable region having a LCDR1, LCDR2, and LCDR3, wherein the HCDR1, HCDR2, and HCDR3 comprises an amino acid sequence of SEQ ID NOS:777-779, respectively and the LCDR1, LCDR2, and LCDR3 comprises an amino acid sequence of SEQ ID NOS:786-788, respectively.

[0070] Aspects of the disclosure relate to an antibody, antigen binding fragment, or polypeptide comprising a heavy chain variable region having a HCDR1, HCDR2, and HCDR3, and a light chain variable region having a LCDR1, LCDR2, and LCDR3, wherein the HCDR1, HCDR2, and HCDR3 comprises an amino acid sequence of SEQ ID NOS:795-797, respectively and the LCDR1, LCDR2, and LCDR3 comprises an amino acid sequence of SEQ ID NOS:804-806, respectively.

[0071] Aspects of the disclosure relate to an antibody, antigen binding fragment, or polypeptide comprising a heavy chain variable region having a HCDR1, HCDR2, and HCDR3, and a light chain variable region having a LCDR1, LCDR2, and LCDR3, wherein the HCDR1, HCDR2, and HCDR3 comprises an amino acid sequence of SEQ ID NOS:813-815, respectively and the LCDR1, LCDR2, and LCDR3 comprises an amino acid sequence of SEQ ID NOS:822-824, respectively.

[0072] Aspects of the disclosure relate to an antibody, antigen binding fragment, or polypeptide comprising a heavy chain variable region having a HCDR1, HCDR2, and HCDR3, and a light chain variable region having a LCDR1, LCDR2, and LCDR3, wherein the HCDR1, HCDR2, and HCDR3 comprises an amino acid sequence of SEQ ID NOS:831-833, respectively and the LCDR1, LCDR2, and LCDR3 comprises an amino acid sequence of SEQ ID NOS:840-842, respectively.

[0073] Aspects of the disclosure relate to an antibody, antigen binding fragment, or polypeptide comprising a heavy chain variable region having a HCDR1, HCDR2, and HCDR3, and a light chain variable region having a LCDR1, LCDR2, and LCDR3, wherein the HCDR1, HCDR2, and HCDR3 comprises an amino acid sequence of SEQ ID NOS:849-851, respectively and the LCDR1, LCDR2, and LCDR3 comprises an amino acid sequence of SEQ ID NOS:858-860, respectively.

[0074] Aspects of the disclosure relate to an antibody, antigen binding fragment, or polypeptide comprising a heavy chain variable region having a HCDR1, HCDR2, and HCDR3, and a light chain variable region having a LCDR1, LCDR2, and LCDR3, wherein the HCDR1, HCDR2, and HCDR3 comprises an amino acid sequence of SEQ ID NOS:867-869, respectively and the LCDR1, LCDR2, and LCDR3 comprises an amino acid sequence of SEQ ID NOS:876-878, respectively.

[0075] Aspects of the disclosure relate to an antibody, antigen binding fragment, or polypeptide comprising a heavy chain variable region having a HCDR1, HCDR2, and HCDR3, and a light chain variable region having a LCDR1, LCDR2, and LCDR3, wherein the HCDR1, HCDR2, and HCDR3 comprises an amino acid sequence of SEQ ID NOS:885-887, respectively and the LCDR1, LCDR2, and LCDR3 comprises an amino acid sequence of SEQ ID NOS:894-896, respectively.

[0076] Aspects of the disclosure relate to an antibody, antigen binding fragment, or polypeptide comprising a heavy chain variable region having a HCDR1, HCDR2, and HCDR3, and a light chain variable region having a LCDR1, LCDR2, and LCDR3, wherein the HCDR1, HCDR2, and HCDR3 comprises an amino acid sequence of SEQ ID NOS:903-905, respectively and the LCDR1, LCDR2, and LCDR3 comprises an amino acid sequence of SEQ ID NOS:912-914, respectively.

[0077] Aspects of the disclosure relate to an antibody, antigen binding fragment, or polypeptide comprising a heavy chain variable region having a HCDR1, HCDR2, and HCDR3, and a light chain variable region having a LCDR1, LCDR2, and LCDR3, wherein the HCDR1, HCDR2, and HCDR3 comprises an amino acid sequence of SEQ ID NOS:921-923, respectively and the LCDR1, LCDR2, and LCDR3 comprises an amino acid sequence of SEQ ID NOS:930-932, respectively.

[0078] Aspects of the disclosure relate to an antibody, antigen binding fragment, or polypeptide comprising a heavy chain variable region having a HCDR1, HCDR2, and HCDR3, and a light chain variable region having a LCDR1, LCDR2, and LCDR3, wherein the HCDR1, HCDR2, and HCDR3 comprises an amino acid sequence of SEQ ID NOS:939-941, respectively and the LCDR1, LCDR2, and LCDR3 comprises an amino acid sequence of SEQ ID NOS:948-950, respectively.

[0079] Aspects of the disclosure relate to an antibody, antigen binding fragment, or polypeptide comprising a heavy chain variable region having a HCDR1, HCDR2, and HCDR3, and a light chain variable region having a LCDR1, LCDR2, and LCDR3, wherein the HCDR1, HCDR2, and HCDR3 comprises an amino acid sequence of SEQ ID NOS:957-959, respectively and the LCDR1, LCDR2, and LCDR3 comprises an amino acid sequence of SEQ ID NOS:966-968, respectively.

[0080] Aspects of the disclosure relate to an antibody, antigen binding fragment, or polypeptide comprising a heavy chain variable region having a HCDR1, HCDR2, and HCDR3, and a light chain variable region having a LCDR1, LCDR2, and LCDR3, wherein the HCDR1, HCDR2, and HCDR3 comprises an amino acid sequence of SEQ ID NOS:975-977, respectively and the LCDR1, LCDR2, and LCDR3 comprises an amino acid sequence of SEQ ID NOS:984-986, respectively.

[0081] Aspects of the disclosure relate to an antibody, antigen binding fragment, or polypeptide comprising a heavy chain variable region having a HCDR1, HCDR2, and HCDR3, and a light chain variable region having a LCDR1, LCDR2, and LCDR3, wherein the HCDR1, HCDR2, and HCDR3 comprises an amino acid sequence of SEQ ID NOS:993-995, respectively and the LCDR1, LCDR2, and LCDR3 comprises an amino acid sequence of SEQ ID NOS:1002-1004, respectively.

[0082] Aspects of the disclosure relate to an antibody, antigen binding fragment, or polypeptide comprising a heavy chain variable region having a HCDR1, HCDR2, and HCDR3, and a light chain variable region having a LCDR1, LCDR2, and LCDR3, wherein the HCDR1, HCDR2, and HCDR3 comprises an amino acid sequence of SEQ ID NOS:1011-1013, respectively and the LCDR1, LCDR2, and LCDR3 comprises an amino acid sequence of SEQ ID NOS:1020-1022, respectively.

[0083] Aspects of the disclosure relate to an antibody, antigen binding fragment, or polypeptide comprising a heavy chain variable region having a HCDR1, HCDR2, and HCDR3, and a light chain variable region having a LCDR1, LCDR2, and LCDR3, wherein the HCDR1, HCDR2, and HCDR3 comprises an amino acid sequence of SEQ ID NOS:1029-1031, respectively and the LCDR1, LCDR2, and LCDR3 comprises an amino acid sequence of SEQ ID NOS:1038-1040, respectively.

[0084] Aspects of the disclosure relate to an antibody, antigen binding fragment, or polypeptide comprising a heavy chain variable region having a HCDR1, HCDR2, and HCDR3, and a light chain variable region having a LCDR1, LCDR2, and LCDR3, wherein the HCDR1, HCDR2, and HCDR3 comprises an amino acid sequence of SEQ ID NOS:1047-1049, respectively and the LCDR1, LCDR2, and LCDR3 comprises an amino acid sequence of SEQ ID NOS:1056-1058, respectively.

[0085] Aspects of the disclosure relate to an antibody, antigen binding fragment, or polypeptide comprising a heavy chain variable region having a HCDR1, HCDR2, and HCDR3, and a light chain variable region having a LCDR1, LCDR2, and LCDR3, wherein the HCDR1, HCDR2, and HCDR3 comprises an amino acid sequence of SEQ ID NOS:1065-1067, respectively and the LCDR1, LCDR2, and LCDR3 comprises an amino acid sequence of SEQ ID NOS:1074-1076, respectively.

[0086] Aspects of the disclosure relate to an antibody, antigen binding fragment, or polypeptide comprising a heavy chain variable region having a HCDR1, HCDR2, and HCDR3, and a light chain variable region having a LCDR1, LCDR2, and LCDR3, wherein the HCDR1, HCDR2, and HCDR3 comprises an amino acid sequence of SEQ ID NOS:1083-1085, respectively and the LCDR1, LCDR2, and LCDR3 comprises an amino acid sequence of SEQ ID NOS:1092-1094, respectively.

[0087] Aspects of the disclosure relate to an antibody, antigen binding fragment, or polypeptide comprising a heavy chain variable region having a HCDR1, HCDR2, and HCDR3, and a light chain variable region having a LCDR1, LCDR2, and LCDR3, wherein the HCDR1, HCDR2, and HCDR3 comprises an amino acid sequence of SEQ ID NOS:1101-1103, respectively and the LCDR1, LCDR2, and LCDR3 comprises an amino acid sequence of SEQ ID NOS:1110-1112, respectively.

[0088] Aspects of the disclosure relate to an antibody, antigen binding fragment, or polypeptide comprising a heavy chain variable region having a HCDR1, HCDR2, and HCDR3, and a light chain variable region having a LCDR1, LCDR2, and LCDR3, wherein the HCDR1, HCDR2, and HCDR3 comprises an amino acid sequence of SEQ ID NOS:1119-1121, respectively and the LCDR1, LCDR2, and LCDR3 comprises an amino acid sequence of SEQ ID NOS:1128-1130, respectively.

[0089] Aspects of the disclosure relate to an antibody, antigen binding fragment, or polypeptide comprising a heavy chain variable region having a HCDR1, HCDR2, and HCDR3, and a light chain variable region having a LCDR1, LCDR2, and LCDR3, wherein the HCDR1, HCDR2, and HCDR3 comprises an amino acid sequence of SEQ ID NOS:1137-1139, respectively and the LCDR1, LCDR2, and LCDR3 comprises an amino acid sequence of SEQ ID NOS:1146-1148, respectively.

[0090] Aspects of the disclosure relate to an antibody, antigen binding fragment, or polypeptide comprising a heavy chain variable region having a HCDR1, HCDR2, and HCDR3, and a light chain variable region having a LCDR1, LCDR2, and LCDR3, wherein the HCDR1, HCDR2, and HCDR3 comprises an amino acid sequence of SEQ ID NOS:1155-1157, respectively and the LCDR1, LCDR2, and LCDR3 comprises an amino acid sequence of SEQ ID NOS:1164-1166, respectively.

[0091] Aspects of the disclosure relate to an antibody, antigen binding fragment, or polypeptide comprising a heavy chain variable region having a HCDR1, HCDR2, and HCDR3, and a light chain variable region having a LCDR1, LCDR2, and LCDR3, wherein the HCDR1, HCDR2, and HCDR3 comprises an amino acid sequence of SEQ ID NOS:1173-1175, respectively and the LCDR1, LCDR2, and LCDR3 comprises an amino acid sequence of SEQ ID NOS:1182-1184, respectively.

[0092] Aspects of the disclosure relate to an antibody, antigen binding fragment, or polypeptide comprising a heavy chain variable region having a HCDR1, HCDR2, and HCDR3, and a light chain variable region having a LCDR1, LCDR2, and LCDR3, wherein the HCDR1, HCDR2, and HCDR3 comprises an amino acid sequence of SEQ ID NOS:1191-1193, respectively and the LCDR1, LCDR2, and LCDR3 comprises an amino acid sequence of SEQ ID NOS:1200-1202, respectively.

[0093] Aspects of the disclosure relate to an antibody, antigen binding fragment, or polypeptide comprising a heavy chain variable region having a HCDR1, HCDR2, and HCDR3, and a light chain variable region having a LCDR1, LCDR2, and LCDR3, wherein the HCDR1, HCDR2, and HCDR3 comprises an amino acid sequence of SEQ ID NOS:1209-1211, respectively and the LCDR1, LCDR2, and LCDR3 comprises an amino acid sequence of SEQ ID NOS:1218-1220, respectively.

[0094] Aspects of the disclosure relate to an antibody, antigen binding fragment, or polypeptide comprising a heavy chain variable region having a HCDR1, HCDR2, and HCDR3, and a light chain variable region having a LCDR1, LCDR2, and LCDR3, wherein the HCDR1, HCDR2, and HCDR3 comprises an amino acid sequence of SEQ ID NOS:1227-1229, respectively and the LCDR1, LCDR2, and LCDR3 comprises an amino acid sequence of SEQ ID NOS:1236-1238, respectively.

[0095] Aspects of the disclosure relate to an antibody, antigen binding fragment, or polypeptide comprising a heavy chain variable region having a HCDR1, HCDR2, and HCDR3, and a light chain variable region having a LCDR1, LCDR2, and LCDR3, wherein the HCDR1, HCDR2, and HCDR3 comprises an amino acid sequence of SEQ ID NOS:1245-1247, respectively and the LCDR1, LCDR2, and LCDR3 comprises an amino acid sequence of SEQ ID NOS:1254-1256, respectively.

[0096] Aspects of the disclosure relate to an antibody, antigen binding fragment, or polypeptide comprising a heavy chain variable region having a HCDR1, HCDR2, and HCDR3, and a light chain variable region having a LCDR1, LCDR2, and LCDR3, wherein the HCDR1, HCDR2, and HCDR3 comprises an amino acid sequence of SEQ ID NOS:1263-1265, respectively and the LCDR1, LCDR2, and LCDR3 comprises an amino acid sequence of SEQ ID NOS:1272-1274, respectively.

[0097] Aspects of the disclosure relate to an antibody, antigen binding fragment, or polypeptide comprising a heavy chain variable region having a HCDR1, HCDR2, and HCDR3, and a light chain variable region having a LCDR1, LCDR2, and LCDR3, wherein the HCDR1, HCDR2, and HCDR3 comprises an amino acid sequence of SEQ ID NOS:1281-1283, respectively and the LCDR1, LCDR2, and LCDR3 comprises an amino acid sequence of SEQ ID NOS:1290-1292, respectively.

[0098] Aspects of the disclosure relate to an antibody, antigen binding fragment, or polypeptide comprising a heavy chain variable region having a HCDR1, HCDR2, and HCDR3, and a light chain variable region having a LCDR1, LCDR2, and LCDR3, wherein the HCDR1, HCDR2, and HCDR3 comprises an amino acid sequence of SEQ ID NOS:1299-1301, respectively and the LCDR1, LCDR2, and LCDR3 comprises an amino acid sequence of SEQ ID NOS:1308-1310, respectively.

[0099] Aspects of the disclosure relate to an antibody, antigen binding fragment, or polypeptide comprising a heavy chain variable region having a HCDR1, HCDR2, and HCDR3, and a light chain variable region having a LCDR1, LCDR2, and LCDR3, wherein the HCDR1, HCDR2, and HCDR3 comprises an amino acid sequence of SEQ ID NOS:1317-1319, respectively and the LCDR1, LCDR2, and LCDR3 comprises an amino acid sequence of SEQ ID NOS:1326-1328, respectively.

[0100] Aspects of the disclosure relate to an antibody, antigen binding fragment, or polypeptide comprising a heavy chain variable region having a HCDR1, HCDR2, and HCDR3, and a light chain variable region having a LCDR1, LCDR2, and LCDR3, wherein the HCDR1, HCDR2, and HCDR3 comprises an amino acid sequence of SEQ ID NOS:1335-1337, respectively and the LCDR1, LCDR2, and LCDR3 comprises an amino acid sequence of SEQ ID NOS:1344-1346, respectively.

[0101] Aspects of the disclosure relate to an antibody, antigen binding fragment, or polypeptide comprising a heavy chain variable region having a HCDR1, HCDR2, and HCDR3, and a light chain variable region having a LCDR1, LCDR2, and LCDR3, wherein the HCDR1, HCDR2, and HCDR3 comprises an amino acid sequence of SEQ ID NOS:1353-1355, respectively and the LCDR1, LCDR2, and LCDR3 comprises an amino acid sequence of SEQ ID NOS:1362-1364, respectively.

[0102] Aspects of the disclosure relate to an antibody, antigen binding fragment, or polypeptide comprising a heavy chain variable region having a HCDR1, HCDR2, and HCDR3, and a light chain variable region having a LCDR1, LCDR2, and LCDR3, wherein the HCDR1, HCDR2, and HCDR3 comprises an amino acid sequence of SEQ ID NOS:1371-1373, respectively and the LCDR1, LCDR2, and LCDR3 comprises an amino acid sequence of SEQ ID NOS:1380-1382, respectively.

[0103] Aspects of the disclosure relate to an antibody, antigen binding fragment, or polypeptide comprising a heavy chain variable region having a HCDR1, HCDR2, and HCDR3, and a light chain variable region having a LCDR1, LCDR2, and LCDR3, wherein the HCDR1, HCDR2, and HCDR3 comprises an amino acid sequence of SEQ ID NOS:1389-1391, respectively and the LCDR1, LCDR2, and LCDR3 comprises an amino acid sequence of SEQ ID NOS:1398-1400, respectively.

[0104] Aspects of the disclosure relate to an antibody, antigen binding fragment, or polypeptide comprising a heavy chain variable region having a HCDR1, HCDR2, and HCDR3, and a light chain variable region having a LCDR1, LCDR2, and LCDR3, wherein the HCDR1, HCDR2, and HCDR3 comprises an amino acid sequence of SEQ ID NOS:1407-1409, respectively and the LCDR1, LCDR2, and LCDR3 comprises an amino acid sequence of SEQ ID NOS:1416-1418, respectively.

[0105] Aspects of the disclosure relate to an antibody, antigen binding fragment, or polypeptide comprising a heavy chain variable region having a HCDR1, HCDR2, and HCDR3, and a light chain variable region having a LCDR1, LCDR2, and LCDR3, wherein the HCDR1, HCDR2, and HCDR3 comprises an amino acid sequence of SEQ ID NOS:1425-1427, respectively and the LCDR1, LCDR2, and LCDR3 comprises an amino acid sequence of SEQ ID NOS:1434-1436, respectively.

[0106] Aspects of the disclosure relate to an antibody, antigen binding fragment, or polypeptide comprising a heavy chain variable region having a HCDR1, HCDR2, and HCDR3, and a light chain variable region having a LCDR1, LCDR2, and LCDR3, wherein the HCDR1, HCDR2, and HCDR3 comprises an amino acid sequence of SEQ ID NOS:1443-1445, respectively and the LCDR1, LCDR2, and LCDR3 comprises an amino acid sequence of SEQ ID NOS:1452-1454, respectively.

[0107] Aspects of the disclosure relate to an antibody, antigen binding fragment, or polypeptide comprising a heavy chain variable region having a HCDR1, HCDR2, and HCDR3, and a light chain variable region having a LCDR1, LCDR2, and LCDR3, wherein the HCDR1, HCDR2, and HCDR3 comprises an amino acid sequence of SEQ ID NOS:1461-1463, respectively and the LCDR1, LCDR2, and LCDR3 comprises an amino acid sequence of SEQ ID NOS:1470-1472, respectively.

[0108] Aspects of the disclosure relate to an antibody, antigen binding fragment, or polypeptide comprising a heavy chain variable region having a HCDR1, HCDR2, and HCDR3, and a light chain variable region having a LCDR1, LCDR2, and LCDR3, wherein the HCDR1, HCDR2, and HCDR3 comprises an amino acid sequence of SEQ ID NOS:1479-1481, respectively and the LCDR1, LCDR2, and LCDR3 comprises an amino acid sequence of SEQ ID NOS:1488-1490, respectively.

[0109] Aspects of the disclosure relate to an antibody, antigen binding fragment, or polypeptide comprising a heavy chain variable region having a HCDR1, HCDR2, and HCDR3, and a light chain variable region having a LCDR1, LCDR2, and LCDR3, wherein the HCDR1, HCDR2, and HCDR3 comprises an amino acid sequence of SEQ ID NOS:1497-1499, respectively and the LCDR1, LCDR2, and LCDR3 comprises an amino acid sequence of SEQ ID NOS:1506-1508, respectively.

[0110] Aspects of the disclosure relate to an antibody, antigen binding fragment, or polypeptide comprising a heavy chain variable region having a HCDR1, HCDR2, and HCDR3, and a light chain variable region having a LCDR1, LCDR2, and LCDR3, wherein the HCDR1, HCDR2, and HCDR3 comprises an amino acid sequence of SEQ ID NOS:1515-1517, respectively and the LCDR1, LCDR2, and LCDR3 comprises an amino acid sequence of SEQ ID NOS:1524-1526, respectively.

[0111] Aspects of the disclosure relate to an antibody, antigen binding fragment, or polypeptide comprising a heavy chain variable region having a HCDR1, HCDR2, and HCDR3, and a light chain variable region having a LCDR1, LCDR2, and LCDR3, wherein the HCDR1, HCDR2, and HCDR3 comprises an amino acid sequence of SEQ ID NOS:1533-1535, respectively and the LCDR1, LCDR2, and LCDR3 comprises an amino acid sequence of SEQ ID NOS:1542-1544, respectively.

[0112] Aspects of the disclosure relate to an antibody, antigen binding fragment, or polypeptide comprising a heavy chain variable region having a HCDR1, HCDR2, and HCDR3, and a light chain variable region having a LCDR1, LCDR2, and LCDR3, wherein the HCDR1, HCDR2, and HCDR3 comprises an amino acid sequence of SEQ ID NOS:1551-1553, respectively and the LCDR1, LCDR2, and LCDR3 comprises an amino acid sequence of SEQ ID NOS:1560-1562, respectively.

[0113] Aspects of the disclosure relate to an antibody, antigen binding fragment, or polypeptide comprising a heavy chain variable region having a HCDR1, HCDR2, and HCDR3, and a light chain variable region having a LCDR1, LCDR2, and LCDR3, wherein the HCDR1, HCDR2, and HCDR3 comprises an amino acid sequence of SEQ ID NOS:1569-1571, respectively and the LCDR1, LCDR2, and LCDR3 comprises an amino acid sequence of SEQ ID NOS:1578-1580, respectively.

[0114] Aspects of the disclosure relate to an antibody, antigen binding fragment, or polypeptide comprising a heavy chain variable region having a HCDR1, HCDR2, and HCDR3, and a light chain variable region having a LCDR1, LCDR2, and LCDR3, wherein the HCDR1, HCDR2, and HCDR3 comprises an amino acid sequence of SEQ ID NOS:1587-1589, respectively and the LCDR1, LCDR2, and LCDR3 comprises an amino acid sequence of SEQ ID NOS:1596-1598, respectively.

[0115] Aspects of the disclosure relate to an antibody, antigen binding fragment, or polypeptide comprising a heavy chain variable region having a HCDR1, HCDR2, and HCDR3, and a light chain variable region having a LCDR1, LCDR2, and LCDR3, wherein the HCDR1, HCDR2, and HCDR3 comprises an amino acid sequence of SEQ ID NOS:1605-1607, respectively and the LCDR1, LCDR2, and LCDR3 comprises an amino acid sequence of SEQ ID NOS:1614-1616, respectively.

[0116] Aspects of the disclosure relate to an antibody, antigen binding fragment, or polypeptide comprising a heavy chain variable region having a HCDR1, HCDR2, and HCDR3, and a light chain variable region having a LCDR1, LCDR2, and LCDR3, wherein the HCDR1, HCDR2, and HCDR3 comprises an amino acid sequence of SEQ ID NOS:1827-1829, respectively and the LCDR1, LCDR2, and LCDR3 comprises an amino acid sequence of SEQ ID NOS:1836-1838, respectively.

[0117] Aspects of the disclosure relate to an antibody, antigen binding fragment, or polypeptide comprising a heavy chain variable region having a HCDR1, HCDR2, and HCDR3, and a light chain variable region having a LCDR1, LCDR2, and LCDR3, wherein the HCDR1, HCDR2, and HCDR3 comprises an amino acid sequence of SEQ ID NOS:1845-1847, respectively and the LCDR1, LCDR2, and LCDR3 comprises an amino acid sequence of SEQ ID NOS:1854-1856, respectively.

[0118] Aspects of the disclosure relate to an antibody, antigen binding fragment, or polypeptide comprising a heavy chain variable region having a HCDR1, HCDR2, and HCDR3, and a light chain variable region having a LCDR1, LCDR2, and LCDR3, wherein the HCDR1, HCDR2, and HCDR3 comprises an amino acid sequence of SEQ ID NOS:1863-1865, respectively and the LCDR1, LCDR2, and LCDR3 comprises an amino acid sequence of SEQ ID NOS:1872-1874, respectively.

[0119] Aspects of the disclosure relate to an antibody, antigen binding fragment, or polypeptide comprising a heavy chain variable region having a HCDR1, HCDR2, and HCDR3, and a light chain variable region having a LCDR1, LCDR2, and LCDR3, wherein the HCDR1, HCDR2, and HCDR3 comprises an amino acid sequence of SEQ ID NOS:1881-1883, respectively and the LCDR1, LCDR2, and LCDR3 comprises an amino acid sequence of SEQ ID NOS:1890-1892, respectively.

[0120] Aspects of the disclosure relate to an antibody, antigen binding fragment, or polypeptide comprising a heavy chain variable region having a HCDR1, HCDR2, and HCDR3, and a light chain variable region having a LCDR1, LCDR2, and LCDR3, wherein the HCDR1, HCDR2, and HCDR3 comprises an amino acid sequence of SEQ ID NOS:1899-1901, respectively and the LCDR1, LCDR2, and LCDR3 comprises an amino acid sequence of SEQ ID NOS:1908-1910, respectively.

[0121] Aspects of the disclosure relate to an antibody, antigen binding fragment, or polypeptide comprising a heavy chain variable region having a HCDR1, HCDR2, and HCDR3, and a light chain variable region having a LCDR1, LCDR2, and LCDR3, wherein the HCDR1, HCDR2, and HCDR3 comprises an amino acid sequence of SEQ ID NOS:1917-1919, respectively and the LCDR1, LCDR2, and LCDR3 comprises an amino acid sequence of SEQ ID NOS:1926-1928, respectively.

[0122] Aspects of the disclosure relate to an antibody, antigen binding fragment, or polypeptide comprising a heavy chain variable region having a HCDR1, HCDR2, and HCDR3, and a light chain variable region having a LCDR1, LCDR2, and LCDR3, wherein the HCDR1, HCDR2, and HCDR3 comprises an amino acid sequence of SEQ ID NOS:1935-1937, respectively and the LCDR1, LCDR2, and LCDR3 comprises an amino acid sequence of SEQ ID NOS:1944-1946, respectively.

[0123] Aspects of the disclosure relate to an antibody, antigen binding fragment, or polypeptide comprising a heavy chain variable region having a HCDR1, HCDR2, and HCDR3, and a light chain variable region having a LCDR1, LCDR2, and LCDR3, wherein the HCDR1, HCDR2, and HCDR3 comprises an amino acid sequence of SEQ ID NOS:1953-1955, respectively and the LCDR1, LCDR2, and LCDR3 comprises an amino acid sequence of SEQ ID NOS:1962-1964, respectively.

[0124] Aspects of the disclosure relate to an antibody, antigen binding fragment, or polypeptide comprising a heavy chain variable region having a HCDR1, HCDR2, and HCDR3, and a light chain variable region having a LCDR1, LCDR2, and LCDR3, wherein the HCDR1, HCDR2, and HCDR3 comprises an amino acid sequence of SEQ ID NOS:1971-1973, respectively and the LCDR1, LCDR2, and LCDR3 comprises an amino acid sequence of SEQ ID NOS:1980-1982, respectively.

[0125] Aspects of the disclosure relate to an antibody, antigen binding fragment, or polypeptide comprising a heavy chain variable region having a HCDR1, HCDR2, and HCDR3, and a light chain variable region having a LCDR1, LCDR2, and LCDR3, wherein the HCDR1, HCDR2, and HCDR3 comprises an amino acid sequence of SEQ ID NOS:1989-1991, respectively and the LCDR1, LCDR2, and LCDR3 comprises an amino acid sequence of SEQ ID NOS:1998-2000, respectively.

[0126] Aspects of the disclosure relate to an antibody, antigen binding fragment, or polypeptide comprising a heavy chain variable region having a HCDR1, HCDR2, and HCDR3, and a light chain variable region having a LCDR1, LCDR2, and LCDR3, wherein the HCDR1, HCDR2, and HCDR3 comprises an amino acid sequence of SEQ ID NOS:2007-2009, respectively and the LCDR1, LCDR2, and LCDR3 comprises an amino acid sequence of SEQ ID NOS:2016-2018, respectively.

[0127] Aspects of the disclosure relate to an antibody, antigen binding fragment, or polypeptide comprising a heavy chain variable region having a HCDR1, HCDR2, and HCDR3, and a light chain variable region having a LCDR1, LCDR2, and LCDR3, wherein the HCDR1, HCDR2, and HCDR3 comprises an amino acid sequence of SEQ ID NOS:2025-2027, respectively and the LCDR1, LCDR2, and LCDR3 comprises an amino acid sequence of SEQ ID NOS:2034-2036, respectively.

[0128] Aspects of the disclosure relate to an antibody, antigen binding fragment, or polypeptide comprising a heavy chain variable region having a HCDR1, HCDR2, and HCDR3, and a light chain variable region having a LCDR1, LCDR2, and LCDR3, wherein the HCDR1, HCDR2, and HCDR3 comprises an amino acid sequence of SEQ ID NOS:2043-2045, respectively and the LCDR1, LCDR2, and LCDR3 comprises an amino acid sequence of SEQ ID NOS:2052-2054, respectively.

[0129] Aspects of the disclosure relate to an antibody, antigen binding fragment, or polypeptide comprising a heavy chain variable region having a HCDR1, HCDR2, and HCDR3, and a light chain variable region having a LCDR1, LCDR2, and LCDR3, wherein the HCDR1, HCDR2, and HCDR3 comprises an amino acid sequence of SEQ ID NOS:2061-2063, respectively and the LCDR1, LCDR2, and LCDR3 comprises an amino acid sequence of SEQ ID NOS:2070-2072, respectively.

[0130] Aspects of the disclosure relate to an antibody, antigen binding fragment, or polypeptide comprising a heavy chain variable region having a HCDR1, HCDR2, and HCDR3, and a light chain variable region having a LCDR1, LCDR2, and LCDR3, wherein the HCDR1, HCDR2, and HCDR3 comprises an amino acid sequence of SEQ ID NOS:2079-2081, respectively and the LCDR1, LCDR2, and LCDR3 comprises an amino acid sequence of SEQ ID NOS:2088-2090, respectively.

[0131] Aspects of the disclosure relate to an antibody, antigen binding fragment, or polypeptide comprising a heavy chain variable region having a HCDR1, HCDR2, and HCDR3, and a light chain variable region having a LCDR1, LCDR2, and LCDR3, wherein the HCDR1, HCDR2, and HCDR3 comprises an amino acid sequence of SEQ ID NOS:2097-2099, respectively and the LCDR1, LCDR2, and LCDR3 comprises an amino acid sequence of SEQ ID NOS:2106-2108, respectively.

[0132] Aspects of the disclosure relate to an antibody, antigen binding fragment, or polypeptide comprising a heavy chain variable region having a HCDR1, HCDR2, and HCDR3, and a light chain variable region having a LCDR1, LCDR2, and LCDR3, wherein the HCDR1, HCDR2, and HCDR3 comprises an amino acid sequence of SEQ ID NOS:2115-2117, respectively and the LCDR1, LCDR2, and LCDR3 comprises an amino acid sequence of SEQ ID NOS:2124-2126, respectively.

[0133] Aspects of the disclosure relate to an antibody, antigen binding fragment, or polypeptide comprising a heavy chain variable region having a HCDR1, HCDR2, and HCDR3, and a light chain variable region having a LCDR1, LCDR2, and LCDR3, wherein the HCDR1, HCDR2, and HCDR3 comprises an amino acid sequence of SEQ ID NOS:2133-2135, respectively and the LCDR1, LCDR2, and LCDR3 comprises an amino acid sequence of SEQ ID NOS:2142-2144, respectively.

[0134] Aspects of the disclosure relate to an antibody, antigen binding fragment, or polypeptide comprising a heavy chain variable region having a HCDR1, HCDR2, and HCDR3, and a light chain variable region having a LCDR1, LCDR2, and LCDR3, wherein the HCDR1, HCDR2, and HCDR3 comprises an amino acid sequence of SEQ ID NOS:2151-2153, respectively and the LCDR1, LCDR2, and LCDR3 comprises an amino acid sequence of SEQ ID NOS:2160-2162, respectively.

[0135] Aspects of the disclosure relate to an antibody, antigen binding fragment, or polypeptide comprising a heavy chain variable region having a HCDR1, HCDR2, and HCDR3, and a light chain variable region having a LCDR1, LCDR2, and LCDR3, wherein the HCDR1, HCDR2, and HCDR3 comprises an amino acid sequence of SEQ ID NOS:2169-2171, respectively and the LCDR1, LCDR2, and LCDR3 comprises an amino acid sequence of SEQ ID NOS:2178-2180, respectively.

[0136] Aspects of the disclosure relate to an antibody, antigen binding fragment, or polypeptide comprising a heavy chain variable region having a HCDR1, HCDR2, and HCDR3, and a light chain variable region having a LCDR1, LCDR2, and LCDR3, wherein the HCDR1, HCDR2, and HCDR3 comprises an amino acid sequence of SEQ ID NOS:2187-2189, respectively and the LCDR1, LCDR2, and LCDR3 comprises an amino acid sequence of SEQ ID NOS:2196-2198, respectively.

[0137] Aspects of the disclosure relate to an antibody, antigen binding fragment, or polypeptide comprising a heavy chain variable region having a HCDR1, HCDR2, and HCDR3, and a light chain variable region having a LCDR1, LCDR2, and LCDR3, wherein the HCDR1, HCDR2, and HCDR3 comprises an amino acid sequence of SEQ ID NOS:2205-2207, respectively and the LCDR1, LCDR2, and LCDR3 comprises an amino acid sequence of SEQ ID NOS:2214-2216, respectively.

[0138] Aspects of the disclosure relate to an antibody, antigen binding fragment, or polypeptide comprising a heavy chain variable region having a HCDR1, HCDR2, and HCDR3, and a light chain variable region having a LCDR1, LCDR2, and LCDR3, wherein the HCDR1, HCDR2, and HCDR3 comprises an amino acid sequence of SEQ ID NOS:2223-2225, respectively and the LCDR1, LCDR2, and LCDR3 comprises an amino acid sequence of SEQ ID NOS:2232-2234, respectively.

[0139] Aspects of the disclosure relate to an antibody, antigen binding fragment, or polypeptide comprising a heavy chain variable region having a HCDR1, HCDR2, and HCDR3, and a light chain variable region having a LCDR1, LCDR2, and LCDR3, wherein the HCDR1, HCDR2, and HCDR3 comprises an amino acid sequence of SEQ ID NOS:2241-2243, respectively and the LCDR1, LCDR2, and LCDR3 comprises an amino acid sequence of SEQ ID NOS:2250-2252, respectively.

[0140] Aspects of the disclosure relate to an antibody, antigen binding fragment, or polypeptide comprising a heavy chain variable region having a HCDR1, HCDR2, and HCDR3, and a light chain variable region having a LCDR1, LCDR2, and LCDR3, wherein the HCDR1, HCDR2, and HCDR3 comprises an amino acid sequence of SEQ ID NOS:2259-2261, respectively and the LCDR1, LCDR2, and LCDR3 comprises an amino acid sequence of SEQ ID NOS:2268-2270, respectively.

[0141] Aspects of the disclosure relate to an antibody, antigen binding fragment, or polypeptide comprising a heavy chain variable region having a HCDR1, HCDR2, and HCDR3, and a light chain variable region having a LCDR1, LCDR2, and LCDR3, wherein the HCDR1, HCDR2, and HCDR3 comprises an amino acid sequence of SEQ ID NOS:2277-2279, respectively and the LCDR1, LCDR2, and LCDR3 comprises an amino acid sequence of SEQ ID NOS:2286-2288, respectively.

[0142] Aspects of the disclosure relate to an antibody, antigen binding fragment, or polypeptide comprising a heavy chain variable region having a HCDR1, HCDR2, and HCDR3, and a light chain variable region having a LCDR1, LCDR2, and LCDR3, wherein the HCDR1, HCDR2, and HCDR3 comprises an amino acid sequence of SEQ ID NOS:2295-2297, respectively and the LCDR1, LCDR2, and LCDR3 comprises an amino acid sequence of SEQ ID NOS:2304-2306, respectively.

[0143] Aspects of the disclosure relate to an antibody, antigen binding fragment, or polypeptide comprising a heavy chain variable region having a HCDR1, HCDR2, and HCDR3, and a light chain variable region having a LCDR1, LCDR2, and LCDR3, wherein the HCDR1, HCDR2, and HCDR3 comprises an amino acid sequence of SEQ ID NOS:2313-2315, respectively and the LCDR1, LCDR2, and LCDR3 comprises an amino acid sequence of SEQ ID NOS:2322-2324, respectively.

[0144] Aspects of the disclosure relate to an antibody, antigen binding fragment, or

[0145] polypeptide comprising a heavy chain variable region having a HCDR1, HCDR2, and HCDR3, and a light chain variable region having a LCDR1, LCDR2, and LCDR3, wherein the HCDR1, HCDR2, and HCDR3 comprises an amino acid sequence of SEQ ID NOS:2331-2333, respectively and the LCDR1, LCDR2, and LCDR3 comprises an amino acid sequence of SEQ ID NOS:2340-2342, respectively.

[0146] Aspects of the disclosure relate to an antibody, antigen binding fragment, or polypeptide comprising a heavy chain variable region having a HCDR1, HCDR2, and HCDR3, and a light chain variable region having a LCDR1, LCDR2, and LCDR3, wherein the HCDR1, HCDR2, and HCDR3 comprises an amino acid sequence of SEQ ID NOS:2349-2351, respectively and the LCDR1, LCDR2, and LCDR3 comprises an amino acid sequence of SEQ ID NOS:2358-2360, respectively.

[0147] Aspects of the disclosure relate to an antibody, antigen binding fragment, or polypeptide comprising a heavy chain variable region having a HCDR1, HCDR2, and HCDR3, and a light chain variable region having a LCDR1, LCDR2, and LCDR3, wherein the HCDR1, HCDR2, and HCDR3 comprises an amino acid sequence of SEQ ID NOS:2367-2369, respectively and the LCDR1, LCDR2, and LCDR3 comprises an amino acid sequence of SEQ ID NOS:2376-2378, respectively.

[0148] Aspects of the disclosure relate to an antibody, antigen binding fragment, or polypeptide comprising a heavy chain variable region having a HCDR1, HCDR2, and HCDR3, and a light chain variable region having a LCDR1, LCDR2, and LCDR3, wherein the HCDR1, HCDR2, and HCDR3 comprises an amino acid sequence of SEQ ID NOS:2385-2387, respectively and the LCDR1, LCDR2, and LCDR3 comprises an amino acid sequence of SEQ ID NOS:2394-2396, respectively.

[0149] Aspects of the disclosure relate to an antibody, antigen binding fragment, or

[0150] polypeptide comprising a heavy chain variable region having a HCDR1, HCDR2, and HCDR3, and a light chain variable region having a LCDR1, LCDR2, and LCDR3, wherein the HCDR1, HCDR2, and HCDR3 comprises an amino acid sequence of SEQ ID NOS:2403-2405, respectively and the LCDR1, LCDR2, and LCDR3 comprises an amino acid sequence of SEQ ID NOS:2412-2414, respectively.

[0151] Aspects of the disclosure relate to an antibody, antigen binding fragment, or polypeptide comprising a heavy chain variable region having a HCDR1, HCDR2, and HCDR3, and a light chain variable region having a LCDR1, LCDR2, and LCDR3, wherein the HCDR1, HCDR2, and HCDR3 comprises an amino acid sequence of SEQ ID NOS:2421-2423, respectively and the LCDR1, LCDR2, and LCDR3 comprises an amino acid sequence of SEQ ID NOS:2430-2432, respectively.

[0152] Aspects of the disclosure relate to an antibody, antigen binding fragment, or polypeptide comprising a heavy chain variable region having a HCDR1, HCDR2, and HCDR3, and a light chain variable region having a LCDR1, LCDR2, and LCDR3, wherein the HCDR1, HCDR2, and HCDR3 comprises an amino acid sequence of SEQ ID NOS:2439-2441, respectively and the LCDR1, LCDR2, and LCDR3 comprises an amino acid sequence of SEQ ID NOS:2448-2450, respectively.

[0153] Aspects of the disclosure relate to an antibody, antigen binding fragment, or polypeptide comprising a heavy chain variable region having a HCDR1, HCDR2, and HCDR3, and a light chain variable region having a LCDR1, LCDR2, and LCDR3, wherein the HCDR1, HCDR2, and HCDR3 comprises an amino acid sequence of SEQ ID NOS:2457-2459, respectively and the LCDR1, LCDR2, and LCDR3 comprises an amino acid sequence of SEQ ID NOS:2466-2468, respectively.

[0154] Aspects of the disclosure relate to an antibody, antigen binding fragment, or polypeptide comprising a heavy chain variable region having a HCDR1, HCDR2, and HCDR3, and a light chain variable region having a LCDR1, LCDR2, and LCDR3, wherein the HCDR1, HCDR2, and HCDR3 comprises an amino acid sequence of SEQ ID NOS:2475-2477, respectively and the LCDR1, LCDR2, and LCDR3 comprises an amino acid sequence of SEQ ID NOS:2484-2486, respectively.

[0155] Aspects of the disclosure relate to an antibody, antigen binding fragment, or polypeptide comprising a heavy chain variable region having a HCDR1, HCDR2, and HCDR3, and a light chain variable region having a LCDR1, LCDR2, and LCDR3, wherein the HCDR1, HCDR2, and HCDR3 comprises an amino acid sequence of SEQ ID NOS:2493-2495, respectively and the LCDR1, LCDR2, and LCDR3 comprises an amino acid sequence of SEQ ID NOS:2502-2504, respectively.

[0156] Aspects of the disclosure relate to an antibody, antigen binding fragment, or polypeptide comprising a heavy chain variable region having a HCDR1, HCDR2, and HCDR3, and a light chain variable region having a LCDR1, LCDR2, and LCDR3, wherein the HCDR1, HCDR2, and HCDR3 comprises an amino acid sequence of SEQ ID NOS:2511-2513, respectively and the LCDR1, LCDR2, and LCDR3 comprises an amino acid sequence of SEQ ID NOS:2520-2522, respectively.

[0157] Aspects of the disclosure relate to an antibody, antigen binding fragment, or polypeptide comprising a heavy chain variable region having a HCDR1, HCDR2, and HCDR3, and a light chain variable region having a LCDR1, LCDR2, and LCDR3, wherein the HCDR1, HCDR2, and HCDR3 comprises an amino acid sequence of SEQ ID NOS:2529-2531, respectively and the LCDR1, LCDR2, and LCDR3 comprises an amino acid sequence of SEQ ID NOS:2538-2540, respectively.

[0158] Aspects of the disclosure relate to an antibody, antigen binding fragment, or polypeptide comprising a heavy chain variable region having a HCDR1, HCDR2, and HCDR3, and a light chain variable region having a LCDR1, LCDR2, and LCDR3, wherein the HCDR1, HCDR2, and HCDR3 comprises an amino acid sequence of SEQ ID NOS:2547-2549, respectively and the LCDR1, LCDR2, and LCDR3 comprises an amino acid sequence of SEQ ID NOS:2556-2558, respectively.

[0159] Aspects of the disclosure relate to an antibody, antigen binding fragment, or

[0160] polypeptide comprising a heavy chain variable region having a HCDR1, HCDR2, and HCDR3, and a light chain variable region having a LCDR1, LCDR2, and LCDR3, wherein the HCDR1, HCDR2, and HCDR3 comprises an amino acid sequence of SEQ ID NOS:2565-2567, respectively and the LCDR1, LCDR2, and LCDR3 comprises an amino acid sequence of SEQ ID NOS:2574-2576, respectively.

[0161] Aspects of the disclosure relate to an antibody, antigen binding fragment, or polypeptide comprising a heavy chain variable region having a HCDR1, HCDR2, and HCDR3, and a light chain variable region having a LCDR1, LCDR2, and LCDR3, wherein the HCDR1, HCDR2, and HCDR3 comprises an amino acid sequence of SEQ ID NOS:2583-2585, respectively and the LCDR1, LCDR2, and LCDR3 comprises an amino acid sequence of SEQ ID NOS:2592-2594, respectively.

[0162] Aspects of the disclosure relate to an antibody, antigen binding fragment, or polypeptide comprising a heavy chain variable region having a HCDR1, HCDR2, and HCDR3, and a light chain variable region having a LCDR1, LCDR2, and LCDR3, wherein the HCDR1, HCDR2, and HCDR3 comprises an amino acid sequence of SEQ ID NOS:2601-2603, respectively and the LCDR1, LCDR2, and LCDR3 comprises an amino acid sequence of SEQ ID NOS:2610-2612, respectively.

[0163] Aspects of the disclosure relate to an antibody, antigen binding fragment, or polypeptide comprising a heavy chain variable region having a HCDR1, HCDR2, and HCDR3, and a light chain variable region having a LCDR1, LCDR2, and LCDR3, wherein the HCDR1, HCDR2, and HCDR3 comprises an amino acid sequence of SEQ ID NOS:2619-2621, respectively and the LCDR1, LCDR2, and LCDR3 comprises an amino acid sequence of SEQ ID NOS:2628-2630, respectively.

[0164] Aspects of the disclosure relate to an antibody, antigen binding fragment, or

[0165] polypeptide comprising a heavy chain variable region having a HCDR1, HCDR2, and HCDR3, and a light chain variable region having a LCDR1, LCDR2, and LCDR3, wherein the HCDR1, HCDR2, and HCDR3 comprises an amino acid sequence of SEQ ID NOS:2637-2639, respectively and the LCDR1, LCDR2, and LCDR3 comprises an amino acid sequence of SEQ ID NOS:2646-2648, respectively.

[0166] Aspects of the disclosure relate to an antibody, antigen binding fragment, or polypeptide comprising a heavy chain variable region having a HCDR1, HCDR2, and HCDR3, and a light chain variable region having a LCDR1, LCDR2, and LCDR3, wherein the HCDR1, HCDR2, and HCDR3 comprises an amino acid sequence of SEQ ID NOS:2655-2657, respectively and the LCDR1, LCDR2, and LCDR3 comprises an amino acid sequence of SEQ ID NOS:2664-2666, respectively.

[0167] Aspects of the disclosure relate to an antibody, antigen binding fragment, or polypeptide comprising a heavy chain variable region having a HCDR1, HCDR2, and HCDR3, and a light chain variable region having a LCDR1, LCDR2, and LCDR3, wherein the HCDR1, HCDR2, and HCDR3 comprises an amino acid sequence of SEQ ID NOS:2673-2675, respectively and the LCDR1, LCDR2, and LCDR3 comprises an amino acid sequence of SEQ ID NOS:2682-2684, respectively.

[0168] Aspects of the disclosure relate to an antibody, antigen binding fragment, or polypeptide comprising a heavy chain variable region having a HCDR1, HCDR2, and HCDR3, and a light chain variable region having a LCDR1, LCDR2, and LCDR3, wherein the HCDR1, HCDR2, and HCDR3 comprises an amino acid sequence of SEQ ID NOS:2691-2693, respectively and the LCDR1, LCDR2, and LCDR3 comprises an amino acid sequence of SEQ ID NOS:2700-2702, respectively.

[0169] Aspects of the disclosure relate to an antibody, antigen binding fragment, or polypeptide comprising a heavy chain variable region and a light chain variable region of SEQ ID NOS:2 and 11, SEQ ID NOS:20 and 29, SEQ ID NOS:38 and 47, SEQ ID NOS:56 and 65, SEQ ID NOS:74 and 83, SEQ ID NOS:92 and 101, SEQ ID NOS:110 and 119, SEQ ID NOS:128 and 137, SEQ ID NOS:146 and 155, SEQ ID NOS:164 and 173, SEQ ID NOS:182 and 191, SEQ ID NOS:200 and 209, SEQ ID NOS:218 and 227, SEQ ID NOS:236 and 245, SEQ ID NOS:254 and 263, SEQ ID NOS:272 and 281, SEQ ID NOS:290 and 299, SEQ ID NOS:308 and 317, SEQ ID NOS:326 and 335, SEQ ID NOS:344 and 353, SEQ ID NOS:362 and 371, SEQ ID NOS:380 and 389, SEQ ID NOS:398 and 407, SEQ ID NOS:416 and 425, SEQ ID NOS:434 and 443, SEQ ID NOS:452 and 461, SEQ ID NOS:470 and 479, SEQ ID NOS:488 and 497, SEQ ID NOS:506 and 515, SEQ ID NOS:524 and 533, SEQ ID NOS:542 and 551, SEQ ID NOS:560 and 569, SEQ ID NOS:578 and 587, SEQ ID NOS:596 and 605, SEQ ID NOS:614 and 623, SEQ ID NOS:632 and 641, SEQ ID NOS:650 and 659, SEQ ID NOS:668 and 677, SEQ ID NOS:686 and 695, SEQ ID NOS:704 and 713, SEQ ID NOS:722 and 731, SEQ ID NOS:740 and 749, SEQ ID NOS:758 and 767, SEQ ID NOS:776 and 785, SEQ ID NOS:794 and 803, SEQ ID NOS:812 and 821, SEQ ID NOS:830 and 839, SEQ ID NOS:848 and 857, SEQ ID NOS:866 and 875, SEQ ID NOS:884 and 893, SEQ ID NOS:902 and 911, SEQ ID NOS:920 and 929, SEQ ID NOS:938 and 947, SEQ ID NOS:956 and 965, SEQ ID NOS:974 and 983, SEQ ID NOS:992 and 1001, SEQ ID NOS:1010 and 1019, SEQ ID NOS:1028 and 1037, SEQ ID NOS:1046 and 1055, SEQ ID NOS:1064 and 1073, SEQ ID NOS:1082 and 1091, SEQ ID NOS:1100 and 1109, SEQ ID NOS:1118 and 1127, SEQ ID NOS:1136 and 1145, SEQ ID NOS:1154 and 1163, SEQ ID NOS:1172 and 1181, SEQ ID NOS:1190 and 1199, SEQ ID NOS:1208 and 1217, SEQ ID NOS:1226 and 1235, SEQ ID NOS:1244 and 1253, SEQ ID NOS:1262 and 1271, SEQ ID NOS:1280 and 1289, SEQ ID NOS:1298 and 1307, SEQ ID NOS:1316 and 1325, SEQ ID NOS:1334 and 1343, SEQ ID NOS:1352 and 1361, SEQ ID NOS:1370 and 1379, SEQ ID NOS:1388 and 1397, SEQ ID NOS:1406 and 1415, SEQ ID NOS:1424 and 1433, SEQ ID NOS:1442 and 1451, SEQ ID NOS:1460 and 1469, SEQ ID NOS:1478 and 1487, SEQ ID NOS:1496 and 1505, SEQ ID NOS:1514 and 1523, SEQ ID NOS:1532 and 1541, SEQ ID NOS:1550 and 1559, SEQ ID NOS:1568 and 1577, SEQ ID NOS:1586 and 1595, SEQ ID NOS:1604 and 1613, SEQ ID NOS:1826 and 1835, SEQ ID NOS:1844 and 1853, SEQ ID NOS:1862 and 1871, SEQ ID NOS:1880 and 1889, SEQ ID NOS:1898 and 1907, SEQ ID NOS:1916 and 1925, SEQ ID NOS:1934 and 1943, SEQ ID NOS:1952 and 1961, SEQ ID NOS:1970 and 1979, SEQ ID NOS:1988 and 1997, SEQ ID NOS:2006 and 2015, SEQ ID NOS:2024 and 2033, SEQ ID NOS:2042 and 2051, SEQ ID NOS:2060 and 2069, SEQ ID NOS:2078 and 2087, SEQ ID NOS:2096 and 2105, SEQ ID NOS:2114 and 2123, SEQ ID NOS:2132 and 2141, SEQ ID NOS:2150 and 2159, SEQ ID NOS:2168 and 2177, SEQ ID NOS:2186 and 2195, SEQ ID NOS:2204 and 2213, SEQ ID NOS:2222 and 2231, SEQ ID NOS:2240 and 2249, SEQ ID NOS:2258 and 2267, SEQ ID NOS:2276 and 2285, SEQ ID NOS:2294 and 2303, SEQ ID NOS:2312 and 2321, SEQ ID NOS:2330 and 2339, SEQ ID NOS:2348 and 2357, SEQ ID NOS:2366 and 2375, SEQ ID NOS:2384 and 2393, SEQ ID NOS:2402 and 2411, SEQ ID NOS:2420 and 2429, SEQ ID NOS:2438 and 2447, SEQ ID NOS:2456 and 2465, SEQ ID NOS:2474 and 2483, SEQ ID NOS:2492 and 2501, SEQ ID NOS:2510 and 2519, SEQ ID NOS:2528 and 2537, SEQ ID NOS:2546 and 2555, SEQ ID NOS:2564 and 2573, SEQ ID NOS:2582 and 2591, SEQ ID NOS:2600 and 2609, SEQ ID NOS:2618 and 2627, SEQ ID NOS:2636 and 2645, SEQ ID NOS:2654 and 2663, SEQ ID NOS:2672 and 2681, or SEQ ID NOS:2690 and 2699.

[0170] Throughout this application, the term “about” is used to indicate that a value includes the inherent variation of error for the measurement or quantitation method.

[0171] The use of the word “a” or “an” when used in conjunction with the term “comprising” may mean “one,” but it is also consistent with the meaning of “one or more,” “at least one,” and “one or more than one.”

[0172] The phrase “and/or” means “and” or “or”. To illustrate, A, B, and/or C includes: A alone, B alone, C alone, a combination of A and B, a combination of A and C, a combination of B and C, or a combination of A, B, and C. In other words, “and/or” operates as an inclusive or.

[0173] The words “comprising” (and any form of comprising, such as “comprise” and “comprises”), “having” (and any form of having, such as “have” and “has”), “including” (and any form of including, such as “includes” and “include”) or “containing” (and any form of containing, such as “contains” and “contain”) are inclusive or open-ended and do not exclude additional, unrecited elements or method steps.

[0174] The compositions and methods for their use can “comprise,” “consist essentially of,” or “consist of” any of the ingredients or steps disclosed throughout the specification. Compositions and methods “consisting essentially of” any of the ingredients or steps disclosed limits the scope of the claim to the specified materials or steps which do not materially affect the basic and novel characteristic of the claimed invention. As used in this specification and claim(s), the words “comprising” (and any form of comprising, such as “comprise” and “comprises”), “having” (and any form of having, such as “have” and “has”), “including” (and any form of including, such as “includes” and “include”) or “containing” (and any form of containing, such as “contains” and “contain”) are inclusive or open-ended and do not exclude additional, unrecited elements or method steps. It is contemplated that embodiments described herein in the context of the term “comprising” may also be implemented in the context of the term “consisting of” or “consisting essentially of.”

[0175] “Individual, “subject,” and “patient” are used interchangeably and can refer to a human or non-human.

[0176] It is specifically contemplated that any limitation discussed with respect to one embodiment of the invention may apply to any other embodiment of the invention. Furthermore, any composition of the invention may be used in any method of the invention, and any method of the invention may be used to produce or to utilize any composition of the invention. Aspects of an embodiment set forth in the Examples are also embodiments that may be implemented in the context of embodiments discussed elsewhere in a different Example or elsewhere in the application, such as in the Summary of Invention, Detailed Description of the Embodiments, Claims, and description of Figure Legends.

[0177] Any method in the context of a therapeutic, diagnostic, or physiologic purpose or effect may also be described in “use” claim language such as “Use of” any compound, composition, or agent discussed herein for achieving or implementing a described therapeutic, diagnostic, or physiologic purpose or effect.

[0178] Other objects, features and advantages of the present invention will become apparent from the following detailed description. It should be understood, however, that the detailed description and the specific examples, while indicating specific embodiments of the invention, are given by way of illustration only, since various changes and modifications within the spirit and scope of the invention will become apparent to those skilled in the art from this detailed description.

### BRIEF DESCRIPTION OF THE DRAWINGS

[0179] The following drawings form part of the present specification and are included to further demonstrate certain aspects of the present invention. The invention may be better understood by reference to one or more of these drawings in combination with the detailed description of specific embodiments presented herein.

[0180] FIG. 1a-g: B cell subsets enriched for SARS-CoV-2-reactivity are revealed by transcriptome, Ig repertoire, and probe binding. a, Model demonstrating antigen probe preparation and representative gating strategy for sorting antigen-positive B cells. b, Percentage of antigen-probe-positive total B cells (CD19⁺CD3⁻), naïve B cells (CD27⁺CD37^{int}), and memory B cells (CD27⁺CD38^{int}) (left), and naïve vs. memory B cells by subject (right; n=17 subjects yielding quality sequencing data). Statistics are paired non-parametric Friedman test (*p=0.0491; ****p<0.0001; bars=median). c, Integrated transcriptional UMAP analysis of distinct B cell clusters and the corresponding number of B cells per cluster. d, Feature library enrichment of antigen-probe-positive B cells by cluster. e, Percent probe reactivity of all B cells per cluster. f, Ig isotype usage and VH gene SHIM for all antigen-positive B cells per cluster. Bars indicate median with interquartile range. g, Representative visualization of antigen reactivity revealing antigen-specific B cells. Axes indicate antigen probe intensities.

[0181] FIG. 2a-d: Transcriptional analysis distinguishes naïve, innate-like and MBC subsets specific to SARS-CoV-2 proteins. a-b, Trajectory (a) and pseudotime (b) analyses of clusters 0-11 reveals least to most differentiated clusters. Cluster 12 is excluded from trajectory analysis as it represents a separate partition as defined by Monocle3. c, Heatmap showing the top twenty most differentially expressed genes per cluster. Red stars denote genes used in memory B cell (MBC) identification. d, Volcano plots comparing differentially expressed genes in MBC-like clusters relative to cluster 2 (näive B cells). Genes used in MBC identification are indicated: cd27, cd38, hhex, zeb2, pou2afl, spib, cd80, cd86, mcl1, prdm1, abp1, manf, bach2, pax5. Red-colored dots represent a log fold change in expression >0.1 and an adj-p value <0.01. Putative B cell subset identities are highlighted where they could be clearly defined (a).

[0182] FIG. 3a-p: SARS-CoV-2-reactive B cells exhibit unique features for isotype, SHM, subset of origin, and VH gene usage. a-1, Ig isotype, VH gene SHM, and distribution of B cells by integrated cluster for spike—(a, b, c, d), NP—(e, f, g, h) and ORFS-specific B cells (i, j, k, 1). m-p, Tree maps showing frequency of VH gene locus usage for total spike (including RBD) (m), RBD only (n), NP (o), and ORFS-specific B cells (p). Numbers in the center of each pie chart and below each tree map indicate number of cells analyzed per reactivity.

[0183] FIG. 4a-d: Characterization of mAbs from single SARS-CoV-2-reactive B cells. a, Cluster origin of cloned mAbs (n=90). b, Representative plot showing the selection of B cells chosen to clone mAbs, antigen binding curves by ELISA for each reactive mAb (spike, n=38; RBD, n=36; NP, n=19; ORF8, n=24), and percentages of total cloned mAbs exhibiting specificity (right). Dashed line on ELISA curves represents the OD₄₀₅ cutoff of 0.5 for positivity. c, Neutralization potency (log₁₀ PFU/ml) of mAbs (n=80) tested by live SARS-CoV-2 virus plaque assay. Dashed line at x=6.5 indicates cutoff for neutralization. d, Percentage of total spike, NP, and ORF8-specific mAbs that displayed neutralization activity. Numbers below each bar chart indicate the number of mAbs tested for neutralization. ELISA data are representative of 2-4 independent experiments performed in duplicate and mAbs were screened once for neutralization ability.

[0184] FIG. 5a-i: B cell antigen targeting, subset distribution, and adaptability is linked to clinical features. a, Total serum anti-Ig endpoint titers for SARS-CoV-2 antigens determined by ELISA (n=25 subjects). b, Number of IgG/IgA antibody secreting cells (ASCs) per 10⁶ cells determined by ELISpot (n=23 subjects). c. Percentage of antigen-probe-positive cells by subject. d, Percentage of antigen-probe-positive cells stratified by age (years), sex, and symptom duration (weeks). e, Two-sided spearman correlation between percentage of all cells specific to ORF8 and subject age with p and r values indicated. f, Percentage of antigen-probe-positive B cells in MBC-like clusters (3, 4, 5, 6, 7, 9, and 12) or naïve and innate-like clusters (0, 1, 2, 8, 10, 11) stratified by age, sex, and symptom duration. (g-i) VH gene SHM for antigen-specific cells from a given age (g), sex (h), or symptom duration group (i). Data in a and b were analyzed using paired non-parametric Friedman tests with multiple comparisons against the spike (*p=0.0154, ****p<0.0001; bars=median). Red dashed line in a at y=45 indicates cutoff for no serum titer detected. The data in d and f were analyzed using two-sided Chi-square or Fisher's exact tests, (****p<0.0001; ***p=0.0009). Data in g were analyzed using unpaired non-parametric Kruskal-Wallis with multiple comparisons (****p<0.0001; ***p=0.0002; bars=mean). Statistics used in h and i are two-sided unpaired non-parametric Mann-Whitney tests (****p<0.0001; bars=mean). Numbers below each bar chart indicate the number of cells analyzed.

[0185] FIG. 6a-c. Additional characteristics of B cells comprising integrated clusters. a, Antigen-probe-positive B cell distribution across integrated clusters by subject with the number of cells per subject indicated. b, Variable gene segment usage in B cell receptor heavy chains of antigen-probe-positive B cells across integrated clusters. c, Diagrams showing antigen-probe-positive B cells per cluster with probe intensities for the indicated antigens plotted on the axes.

[0186] FIG. 7. Expression of MBC and LLPC gene markers in integrated clusters. Normalized expression levels of the indicated genes represented as violin plots.

[0187] FIG. 8a-i. Heavy and light chain features of SARS-CoV-2 reactive B cells. a-b, Heavy chain (HC, a) and light chain (LC, b) complementarity determining region 3 (CDR3) lengths, shown by antigen-reactivity. c-d, HC (c) and LC (d) isoelectric points pI, shown by antigen-reactivity. e, Number of light chain (LC) somatic hypermutations (SHM), shown by antigen-reactivity. f-i. Tree maps showing frequency of Vk/L gene locus usage for spike—(f), RBD—(g), NP—(h), and ORF8-specific B cells (i). White squares indicate unique Vk/L usages. In panels a-e groups were compared by unpaired nonparametric Kruskal-Wallis test with multiple comparisons (N.S.=not significant, ****p<0.0001; ***p=0.0006; **p=0.0033). For all analyses shown, n=531 for spike, n=47 for RBD, n=293 for NP, and n=463 cells selected for ORF8.

[0188] FIG. 9a-g. Additional features of mAbs cloned from antigen-specific and multi-probe binding B cells. a, ELISA KD for specific mAbs against the spike (n=38), RBD (n=36), ORF8 (n=24), and NP (n=19), versus normalized probe intensity for spike, ORF8, and NP respectively. Whole spike antigen probe intensities are plotted for RBD-binding mAbs. Statistics are two-sided Spearman correlations with p and r values indicated. b, Example selection of multi-probe-reactive B cells. c, Isotype frequencies of multi-probe-reactive B cells. d, Number of VH gene SIAM for multi-probe-reactive B cells. e, Proportion of multi-probe-reactive B cells in integrated clusters. f, Percentage of multi-probe-reactive B cells binding PE-SA-oligo by ELISA. g, Percent multi-probe-reactive B cells exhibiting polyreactivity, as determined by ELISA. Numbers in the center of each pie chart indicate number of B cell s/mAbs analyzed.

[0189] FIG. 10a-e. SARS-CoV-2-specific B cells constitute multiple distinct clusters. (a) Model demonstrating antigen probe preparation and representative gating strategy for sorting antigen-positive B cells. (b) Integrated transcriptional UMAP analysis of distinct B cell clusters (n=42 samples from severe acute [n=10], convalescent visit 1 [n=28], and convalescent visit 2 [n=4] cohorts; 55,656 cells). (c) Cluster quality score determined by ROGUE analysis. (d) UMAP projections showing antigen-specific cells used in all downstream analyses and the clusters they derive from. (e) Quantitative visualization of antigen-specific cells and their distributions across distinct clusters.

[0190] FIG. 11a-c. B cell receptor and transcriptional analysis reveals cluster identities. (a) B cell receptor isotype usage, somatic hypermutation (SHM), and antigen reactivity by cluster for all integrated samples. SHM data are plotted with the overlay indicating the median with interquartile range. (b) Heatmap displaying differentially expressed genes across clusters. A summary of cluster identities is provided below. (c) UMAP projections with cell color indicating gene module scoring for the indicated B cell subsets. Also see Tables S5 and S6.

[0191] FIG. 12a j. B cell immunodominance and adaptability landscapes vary in acute infection in convalescence. (a) UMAP projection showing cells colored by time point of blood draw. Sev acute, severe acute; Cony v1, convalescent visit 1; Cony v2, convalescent visit 2. (b) UMAP projections showing cells binding the specified antigens, colored by time point of blood draw. (c) Percentage of B cells targeting distinct antigens by cohort. Four Cony v1 and Cony v2 subjects represent matched visits. (d-f) Quantification of B cell subsets targeting distinct antigens across cohorts. Also see FIG. 11B, bottom for clusters used to define B cell subsets. Numbers above bars indicate the number of specific cells isolated. (g) Percentage of total antigen-specific memory B cells from ˜1.5-4.5 months (mo) post-symptom onset in four matched-convalescent subjects. Statistics are chi-square test, ****p<0.0001. (h) Variable heavy-chain (VH) somatic hypermutation (SHM) of antigen-specific B cells across both convalescent time points for four matched subjects. Statistics are unpaired non-parametric Mann-Whitney tests, **p=0.0021 and ****p<0.0001. (i and j) Antigen-specific memory B cells divided by SHM tertiles at Cony v1 (I) and Cony v2 time points (J) for four matched subjects.

[0192] FIG. 13a-f. B cells targeting distinct antigens display unique variable gene usages. (a-e) Heatmaps showing the frequency of heavy- and light-chain gene pairings for B cells binding the indicated antigens using integrated data from all cohorts (left; legend indicates number of cells per pairing), and dendrograms showing the top ten variable heavy-chain (VH) gene usages for Cony v1 (n=28) and Cony v2 (n=4) cohorts (right). The number of cells encompassing the top ten VH genes represented per antigen is indicated below each dendrogram. (f) Circos plots showing the top ten heavy- and light-chain gene pairings shared across four matched Cony v1 (left; n=1,293 cells) and Cony v2 (right; n=1,438 cells) subjects. Total antigen-specific cells against SARS2 spike and RBD, HCoV spike, ORF8, and NP are shown.

[0193] FIG. 14a-h. Neutralization capacity and in vivo protective ability of mAbs to the SARS-CoV-2 spike and intracellular proteins. (a) Antigen binding curves by ELISA for antigen-specific mAbs. Dashed line at y=0.5 on ELISA curves represents the OD405 cutoff of 0.5 for positivity (spike, n=43; NP, n=19; ORF8, n=24). Data are representative of two or three independent experiments. Also see Table S7. (b) Neutralization potency (log 10 PFU/ml) of mAbs tested by SARS-CoV-2 virus plaque assay. RBD, n=33; spike non-RBD, n=13; NP, n=18; ORF8, n=24. Dashed line at x=6.5 indicates the cutoff for neutralization. Statistics are non-parametric Kruskal-Wallis with Dunn's post-test for multiple comparisons, ****p<0.0001. Data are representative of one independent experiment. (c) Weight change in hamsters intranasally challenged with SARS-CoV-2, followed by therapeutic intraperitoneal (i.p.) administration of anti-RBD antibodies (mean±SD, n=4 biological replicates for each mAb). Control conditions are PBS injection or injection of an irrelevant Ebola virus anti-GP133 mAb. (d) Viral titers of SARS-CoV-2 in lungs harvested from hamsters post-challenge in (c). Bars indicate mean±SD. Statistics are unpaired non-parametric Kruskal-Wallis with Dunn's post-test for multiple comparisons, *p=0.0135, ***p=0.0011, and **p=0.0075. (e) Weight change of mice intranasally challenged with SARS-CoV-2, followed by therapeutic i.p. administration of anti-ORF8 antibody cocktails (mean±SD, n=3 biological replicates for each mAb). (f) Viral titers of SARS-CoV-2 in lungs harvested from mice post-challenge in (e). Titers are presented as N gene copy number compared with a standard curve, and bars indicate mean±SD. Statistics performed are non-parametric Kruskal-Wallis with Dunn's post-test for multiple comparisons; no differences were significant. (g) Weight change in hamsters intranasally challenged with SARS-CoV-2, followed by therapeutic intraperitoneal (i.p.) administration of an anti-NP antibody (mean±SD, n=4 biological replicates for each mAb). (h) Viral titers of SARS-CoV-2 in lungs harvested from hamsters post-challenge shown in (g). Bars indicate mean±SD. Statistics performed are non-parametric Mann-Whitney test; no differences were significant.

[0194] FIG. 15a-n. Antigen-specificity and B cell subset distribution is linked to clinical features. (a) Reactivity distribution of total antigen-specific B cells by subject for the convalescent visit 1 cohort (n=28). (b-d) Reactivity distribution of total antigen-specific B cells by age (b), disease severity (c), and sex (d). Statistics are chi-square post hoc tests with Holm-Bonferroni adjustment, **p=0.0012 and ****p<0.0001; n.s., not significant. For age groups, 19-35 years, n=1,382 cells, 8 subjects; 36-49 years, n=5,319 cells, 13 subjects; 50-years, n=1,813 cells, 7 subjects. For severity groups, mild, n=990 cells, 4 subjects; moderate, n=4,462 cells, 13 subjects; severe, n=3,062 cells, 11 subjects. For sex, women, n=5,005 cells, 14 subjects; men, n=3,509 cells, 14 subjects. (e) Reactivity of antigen-specific memory B cells (MBCs; top) or naive B cells (bottom) by age group. Statistics are chi-square post hoc tests with Holm-Bonferroni adjustment, *p=0.0145 and ****p<0.0001; n.s., not significant. (f) Reactivity of antigen-specific MBCs (top) or naive B cells (bottom) by disease severity. Statistics are chi-square post hoc tests with Holm-Bonferroni adjustment, *p=0.0143 and ****p<0.0001; n.s., not significant. (g) Variable heavy-chain (VH) somatic hypermutation (SHM) for MBCs by age group (overlay shows median with interquartile range). Statistics are unpaired non-parametric ANOVA with Tukey's test for multiple comparisons, **p=0.002, ***p=0.0008, and ****p<0.0001. (h j) Antigen-specific MBCs by age, divided by SHM tertiles. (k) B cell subset distribution by subject. (1-n) B cell subset distribution by age (1), disease severity (m), and sex (n). Statistics are chi-square post hoc tests with Holm-Bonferroni adjustment, ***p=0.0007 and ****p<0.0001; n.s., not significant. For each group, n is the same as in (b)-(d).

[0195] FIG. 16a-d. B cell cluster distribution and antigen specificity by subject, Related to FIG. 10. (a-b) Overall cluster distribution (top) and antigen-specificity distribution (bottom) for subjects sorted with SARS2 spike (S), SARS2 RBD, NP, and ORF8 antigens, with (a) or without (b) an endemic HCoV cocktail comprised of S proteins from 229E, NL63, OC43, and HKU1 strains. (c) Integrated UMAP analysis showing cluster distribution for two severe acute subjects (R3 and R6) at pooled early (days 0, 1, 3) and late (days 7, 14) sampling time points post-convalescent plasma therapy (left) and summary of cluster distribution per timepoint (right). (d) Distribution in antigen-reactivity for pooled early and late timepoints post-convalescent plasma therapy for severe acute subjects R3 and R6. Statistics are Chi square test, n.s.=not significant.

[0196] FIG. 17a-d. Expression maps of select genes, Related to FIG. 11. (a-d) UMAP projections with cells colored by expression level of indicated genes associated with naïve B cells (a), memory B cells b), antibody-secreting cells (c), and mucosal homing (d). Also see Table S6.

[0197] FIG. 18a-j. Further analysis of antigen-specific B cell properties across distinct cohorts and timepoints, Related to FIG. 12. (a-c) Variable heavy chain (VH) somatic hypermutation (SHM) by antigen-specific B cells shown for severe acute (a; n=10), Cony v1 (b, n=28), or Cony v2 subjects (c; n=4). Overlay shows median with interquartile range. (d) Distribution of memory B cell specificity across visit timepoints for four matched Cony v1 and Cony v2 subjects, sampled at approximately 1.5 and 4.5 months post-symptom onset. Also see Table S1 for sampling time. (e-g) B cell receptor isotype usage by antigen-specific B cells shown for severe acute (e; n=10), Cony v1 (f; n=28), or Cony v2 subjects (g; n=4). (h-j) Total anti-immunoglobulin (Ig) serum titers across timepoints for 16 matched convalescent subjects, shown for SARS2 spike (h), NP (i), and ORF8 antigens (j). Dashed line at y=45 indicates cutoff for positivity; values are staggered in (j) to avoid overlap. Statistics are paired non-parametric Wilcoxon test, *p=0.0386. Data are representative of two independent experiments.

[0198] FIG. 19a-f. Correlation between antigen-probe positive B cells and serum titers, Related to FIG. 12. (a) Matched total anti-immunoglobulin (Ig) serum titers against spike, NP, and ORF8 antigens for Cony v1 subjects (n=28). Statistics are paired non-parametric Friedman test with Dunn's post-test for multiple comparisons, ****p<0.0001; ***p=0.0002; n.s.=not significant. Data are representative of two independent experiments. (b) Matched antigen-specific probe hit per Cony v1 subject (n=28). Statistics are paired non-parametric Friedman test with Dunn's post-test for multiple comparisons, n.s.=not significant. (c-e) Percentage of B cells specific for spike (d), NP (e), or ORF8 (f) in Cony v1 subjects (n=28) compared to serum titer levels for the same antigen. Statistics are nonparametric Spearman correlation, two-tailed, CI=95%, n.s.=not significant. Data are representative of two independent experiments. (f) MAbs cloned from non-specific multi-reactive B cells tested for polyreactivity (left) and PE-SA binding (right) by ELISA (n=10). Data are representative of one independent experiment.

[0199] FIG. 20a-d. Additional analyses of antigen reactivity by clinical parameter, Related to FIG. 15. (a) Percentages of antigen-specific memory B cells (MBCs) shown per Cony v1 subject by age. Age increases left to right along the graph. (b) Percentage of MBCs specific for ORF8 versus age for female (F) Cony V1 subjects (n=14). Statistics are nonparametric Spearman correlation, two-tailed, CI=95%. P value is indicated. (c) Percentage of MBCs specific for ORF8 versus age for male (M) Cony V1 subjects (n=14). Statistics are nonparametric Spearman correlation, two-tailed, CI=95%. P value is indicated, n.s.=not significant. (d) Percentages of antigen specific naïve-like B cells shown for each Cony v1 subject by severity. Severity score increases left to right along the graph, also see Table S1 for severity score per subject.

### DETAILED DESCRIPTION OF THE INVENTION

[0200] Discovery of durable memory B cell (MBC) subsets against neutralizing viral epitopes is critical for determining immune correlates of protection from SARS-CoV-2 infection. Here, the inventors identified functionally distinct SARS-CoV-2-reactive B cell subsets by profiling the repertoire of convalescent COVID-19 patients using a high-throughput B cell sorting and sequencing platform. Utilizing barcoded SARS-CoV-2 antigen baits, the inventors isolated thousands of B cells that segregated into discrete functional subsets specific for the spike, nucleocapsid protein (NP), and open reading frame (ORF) proteins 7a and 8. Spike-specific B cells were enriched in canonical MBC clusters, and monoclonal antibodies (mAbs) from these cells were potently neutralizing. By contrast, B cells specific to ORF8 and NP were enriched in naïve and innate-like clusters, and mAbs against these targets were exclusively non-neutralizing. Finally, the inventors identified that B cell specificity, subset distribution, and affinity maturation were impacted by clinical features such as age, sex, and symptom duration. Together, the data provide a comprehensive tool for evaluating B cell immunity to SARS-CoV-2 infection or vaccination and highlight the complexity of the human B cell response to SARS-CoV-2.

### I. Antibodies

[0201] Aspects of the disclosure relate to antibodies, antigen binding fragments thereof, or polypeptides capable of specifically binding to a SARS-CoV-2 spike (S) protein, NP protein, or ORFS. Certain aspects relate to antibodies, or fragments thereof, that specifically bind to a receptor binding domain (RBD) of a SARS-CoV-2 spike protein.

[0202] The term “antibody” refers to an intact immunoglobulin of any isotype, or a fragment thereof that can compete with the intact antibody for specific binding to the target antigen, and includes chimeric, humanized, fully human, and bispecific antibodies. As used herein, the terms “antibody” or “immunoglobulin” are used interchangeably and refer to any of several classes of structurally related proteins that function as part of the immune response of an animal, including IgG, IgD, IgE, IgA, IgM, and related proteins, as well as polypeptides comprising antibody CDR domains that retain antigen-binding activity.

[0203] The term “antigen” refers to a molecule or a portion of a molecule capable of being bound by a selective binding agent, such as an antibody. An antigen may possess one or more epitopes that are capable of interacting with different antibodies.

[0204] The term “epitope” includes any region or portion of molecule capable eliciting an immune response by binding to an immunoglobulin or to a T-cell receptor. Epitope determinants may include chemically active surface groups such as amino acids, sugar side chains, phosphoryl or sulfonyl groups, and may have specific three-dimensional structural characteristics and/or specific charge characteristics. Generally, antibodies specific for a particular target antigen will preferentially recognize an epitope on the target antigen within a complex mixture.

[0205] The epitope regions of a given polypeptide can be identified using many different epitope mapping techniques are well known in the art, including: x-ray crystallography, nuclear magnetic resonance spectroscopy, site-directed mutagenesis mapping, protein display arrays, see, e.g., Epitope Mapping Protocols, (Johan Rockberg and Johan Nilvebrant, Ed., 2018) Humana Press, New York, N.Y. Such techniques are known in the art and described in, e.g., U.S. Pat. No. 4,708,871; Geysen et al. Proc. Natl. Acad. Sci. USA 81:3998-4002 (1984); Geysen et al. Proc. Natl. Acad. Sci. USA 82:178-182 (1985); Geysen et al. Molec. Immunol. 23:709-715 (1986). Additionally, antigenic regions of proteins can also be predicted and identified using standard antigenicity and hydropathy plots.

[0206] The term “immunogenic sequence” means a molecule that includes an amino acid sequence of at least one epitope such that the molecule is capable of stimulating the production of antibodies in an appropriate host. The term “immunogenic composition” means a composition that comprises at least one immunogenic molecule (e.g., an antigen or carbohydrate).

[0207] An intact antibody is generally composed of two full-length heavy chains and two full-length light chains, but in some instances may include fewer chains, such as antibodies naturally occurring in camelids that may comprise only heavy chains. Antibodies as disclosed herein may be derived solely from a single source or may be “chimeric,” that is, different portions of the antibody may be derived from two different antibodies. For example, the variable or CDR regions may be derived from a rat or murine source, while the constant region is derived from a different animal source, such as a human. The antibodies or binding fragments may be produced in hybridomas, by recombinant DNA techniques, or by enzymatic or chemical cleavage of intact antibodies. Unless otherwise indicated, the term “antibody” includes derivatives, variants, fragments, and muteins thereof, examples of which are described below (Sela-Culang et al., Front Immunol. 2013; 4: 302; 2013).

[0208] The term “light chain” includes a full-length light chain and fragments thereof having sufficient variable region sequence to confer binding specificity. A full-length light chain has a molecular weight of around 25,000 Daltons and includes a variable region domain (abbreviated herein as VL), and a constant region domain (abbreviated herein as CL). There are two classifications of light chains, identified as kappa (κ) and lambda (λ). The term “VL fragment” means a fragment of the light chain of a monoclonal antibody that includes all or part of the light chain variable region, including CDRs. A VL fragment can further include light chain constant region sequences. The variable region domain of the light chain is at the amino-terminus of the polypeptide.

[0209] The term “heavy chain” includes a full-length heavy chain and fragments thereof having sufficient variable region sequence to confer binding specificity. A full-length heavy chain has a molecular weight of around 50,000 Daltons and includes a variable region domain (abbreviated herein as VH), and three constant region domains (abbreviated herein as CH1, CH2, and CH3). The term “VH fragment” means a fragment of the heavy chain of a monoclonal antibody that includes all or part of the heavy chain variable region, including CDRs. A VH fragment can further include heavy chain constant region sequences. The number of heavy chain constant region domains will depend on the isotype. The VH domain is at the amino-terminus of the polypeptide, and the CH domains are at the carboxy-terminus, with the CH3 being closest to the —COOH end. The isotype of an antibody can be IgM, IgD, IgG, IgA, or IgE and is defined by the heavy chains present of which there are five classifications: mu (μ), delta (δ), gamma (γ), alpha (α), or epsilon (ε) chains, respectively. IgG has several subtypes, including, but not limited to, IgG1, IgG2, IgG3, and IgG4. IgM subtypes include IgM1 and IgM2. IgA subtypes include IgA1 and IgA2.

[0210] A. Types of Antibodies

[0211] Antibodies can be whole immunoglobulins of any isotype or classification, chimeric antibodies, or hybrid antibodies with specificity to two or more antigens. They may also be fragments (e.g., F(ab′)2, Fab′, Fab, Fv, and the like), including hybrid fragments. An immunoglobulin also includes natural, synthetic, or genetically engineered proteins that act like an antibody by binding to specific antigens to form a complex. The term antibody includes genetically engineered or otherwise modified forms of immunoglobulins.

[0212] The term “monomer” means an antibody containing only one Ig unit. Monomers are the basic functional units of antibodies. The term “dimer” means an antibody containing two Ig units attached to one another via constant domains of the antibody heavy chains (the Fc, or fragment crystallizable, region). The complex may be stabilized by a joining (J) chain protein. The term “multimer” means an antibody containing more than two Ig units attached to one another via constant domains of the antibody heavy chains (the Fc region). The complex may be stabilized by a joining (J) chain protein.

[0213] The term “bivalent antibody” means an antibody that comprises two antigen-binding sites. The two binding sites may have the same antigen specificities or they may be bispecific, meaning the two antigen-binding sites have different antigen specificities.

[0214] Bispecific antibodies are a class of antibodies that have two paratopes with different binding sites for two or more distinct epitopes. In some embodiments, bispecific antibodies can be biparatopic, wherein a bispecific antibody may specifically recognize a different epitope from the same antigen. In some embodiments, bispecific antibodies can be constructed from a pair of different single domain antibodies termed “nanobodies”. Single domain antibodies are sourced and modified from cartilaginous fish and camelids. Nanobodies can be joined together by a linker using techniques typical to a person skilled in the art; such methods for selection and joining of nanobodies are described in PCT Publication No. WO2015044386A1, No. WO2010037838A2, and Bever et al., Anal Chem. 86:7875-7882 (2014), each of which are specifically incorporated herein by reference in their entirety.

[0215] Bispecific antibodies can be constructed as: a whole IgG, Fab′2, Fab′PEG, a diabody, or alternatively as scFv. Diabodies and scFvs can be constructed without an Fc region, using only variable domains, potentially reducing the effects of anti-idiotypic reaction. Bispecific antibodies may be produced by a variety of methods including, but not limited to, fusion of hybridomas or linking of Fab′ fragments. See, e.g., Songsivilai and Lachmann, Clin. Exp. Immunol. 79:315-321 (1990); Kostelny et al., J. Immunol. 148:1547-1553 (1992), each of which are specifically incorporated by reference in their entirety.

[0216] In certain aspects, the antigen-binding domain may be multispecific or heterospecific by multimerizing with VH and VL region pairs that bind a different antigen. For example, the antibody may bind to, or interact with, (a) a cell surface antigen, (b) an Fc receptor on the surface of an effector cell, or (c) at least one other component. Accordingly, aspects may include, but are not limited to, bispecific, trispecific, tetraspecific, and other multispecific antibodies or antigen-binding fragments thereof that are directed to epitopes and to other targets, such as Fc receptors on effector cells.

[0217] In some embodiments, multispecific antibodies can be used and directly linked via a short flexible polypeptide chain, using routine methods known in the art. One such example is diabodies that are bivalent, bispecific antibodies in which the VH and VL domains are expressed on a single polypeptide chain, and utilize a linker that is too short to allow for pairing between domains on the same chain, thereby forcing the domains to pair with complementary domains of another chain creating two antigen binding sites. The linker functionality is applicable for embodiments of triabodies, tetrabodies, and higher order antibody multimers. (see, e.g., Hollinger et al., Proc Natl. Acad. Sci. USA 90:6444-6448 (1993); Polijak et al., Structure 2:1121-1123 (1994); Todorovska et al., J. Immunol. Methods 248:47-66 (2001)).

[0218] Bispecific diabodies, as opposed to bispecific whole antibodies, may also be advantageous because they can be readily constructed and expressed in E. coli. Diabodies (and other polypeptides such as antibody fragments) of appropriate binding specificities can be readily selected using phage display (WO94/13804) from libraries. If one arm of the diabody is kept constant, for instance, with a specificity directed against a protein, then a library can be made where the other arm is varied and an antibody of appropriate specificity selected. Bispecific whole antibodies may be made by alternative engineering methods as described in Ridgeway et al., (Protein Eng., 9:616-621, 1996) and Krah et al., (N Biotechnol. 39:167-173, 2017), each of which is hereby incorporated by reference in their entirety.

[0219] Heteroconjugate antibodies are composed of two covalently linked monoclonal antibodies with different specificities. See, e.g., U.S. Pat. No. 6,010,902, incorporated herein by reference in its entirety.

[0220] The part of the Fv fragment of an antibody molecule that binds with high specificity to the epitope of the antigen is referred to herein as the “paratope.” The paratope consists of the amino acid residues that make contact with the epitope of an antigen to facilitate antigen recognition. Each of the two Fv fragments of an antibody is composed of the two variable domains, VH and VL, in dimerized configuration. The primary structure of each of the variable domains includes three hypervariable loops separated by, and flanked by, Framework Regions (FR). The hypervariable loops are the regions of highest primary sequences variability among the antibody molecules from any mammal. The term hypervariable loop is sometimes used interchangeably with the term “Complementarity Determining Region (CDR).” The length of the hypervariable loops (or CDRs) varies between antibody molecules. The framework regions of all antibody molecules from a given mammal have high primary sequence similarity/consensus. The consensus of framework regions can be used by one skilled in the art to identify both the framework regions and the hypervariable loops (or CDRs) which are interspersed among the framework regions. The hypervariable loops are given identifying names which distinguish their position within the polypeptide, and on which domain they occur. CDRs in the VL domain are identified as L1, L2, and L3, with L1 occurring at the most distal end and L3 occurring closest to the CL domain. The CDRs may also be given the names CDR-L1, CDR-L2, and CDR-L3. The L3 (CDR-L3) is generally the region of highest variability among all antibody molecules produced by a given organism. The CDRs are regions of the polypeptide chain arranged linearly in the primary structure, and separated from each other by Framework Regions. The amino terminal (N-terminal) end of the VL chain is named FR1. The region identified as FR2 occurs between L1 and L2 hypervariable loops. FR3 occurs between L2 and L3 hypervariable loops, and the FR4 region is closest to the CL domain. This structure and nomenclature is repeated for the VH chain, which includes three CDRs identified as CDR-H1, CDR-H2 and CDR-H3. The majority of amino acid residues in the variable domains, or Fv fragments (VH and VL), are part of the framework regions (approximately 85%). The three dimensional, or tertiary, structure of an antibody molecule is such that the framework regions are more internal to the molecule and provide the majority of the structure, with the CDRs on the external surface of the molecule.

[0221] Several methods have been developed and can be used by one skilled in the art to identify the exact amino acids that constitute each of these regions. This can be done using any of a number of multiple sequence alignment methods and algorithms, which identify the conserved amino acid residues that make up the framework regions, therefore identifying the CDRs that may vary in length but are located between framework regions. Three commonly used methods have been developed for identification of the CDRs of antibodies: Kabat (as described in T. T. Wu and E. A. Kabat, “AN ANALYSIS OF THE SEQUENCES OF THE VARIABLE REGIONS OF BENCE JONES PROTEINS AND MYELOMA LIGHT CHAINS AND THEIR IMPLICATIONS FOR ANTIBODY COMPLEMENTARITY,” J Exp Med, vol. 132, no. 2, pp. 211-250, August 1970); Chothia (as described in C. Chothia et al., “Conformations of immunoglobulin hypervariable regions,” Nature, vol. 342, no 6252, pp. 877-883, December 1989); and IMGT (as described in M.-P. Lefranc et al., “IMGT unique numbering for immunoglobulin and T cell receptor variable domains and Ig superfamily V-like domains,” Developmental & Comparative Immunology, vol. 27, no. 1, pp. 55-77, January 2003). These methods each include unique numbering systems for the identification of the amino acid residues that constitute the variable regions. In most antibody molecules, the amino acid residues that actually contact the epitope of the antigen occur in the CDRs, although in some cases, residues within the framework regions contribute to antigen binding.

[0222] One skilled in the art can use any of several methods to determine the paratope of an antibody. These methods include:

[0223] 1) Computational predictions of the tertiary structure of the antibody/epitope binding interactions based on the chemical nature of the amino acid sequence of the antibody variable region and composition of the epitope.

[0224] 2) Hydrogen-deuterium exchange and mass spectroscopy

[0225] 3) Polypeptide fragmentation and peptide mapping approaches in which one generates multiple overlapping peptide fragments from the full length of the polypeptide and evaluates the binding affinity of these peptides for the epitope.

[0226] 4) Antibody Phage Display Library analysis in which the antibody Fab fragment encoding genes of the mammal are expressed by bacteriophage in such a way as to be incorporated into the coat of the phage. This population of Fab expressing phage are then allowed to interact with the antigen which has been immobilized or may be expressed in by a different exogenous expression system. Non-binding Fab fragments are washed away, thereby leaving only the specific binding Fab fragments attached to the antigen. The binding Fab fragments can be readily isolated and the genes which encode them determined. This approach can also be used for smaller regions of the Fab fragment including Fv fragments or specific VH and VL domains as appropriate.

[0227] In certain aspects, affinity matured antibodies are enhanced with one or more modifications in one or more CDRs thereof that result in an improvement in the affinity of the antibody for a target antigen as compared to a parent antibody that does not possess those alteration(s). Certain affinity matured antibodies will have nanomolar or picomolar affinities for the target antigen. Affinity matured antibodies are produced by procedures known in the art, e.g., Marks et al., Bio/Technology 10:779 (1992) describes affinity maturation by VH and VL domain shuffling, random mutagenesis of CDR and/or framework residues employed in phage display is described by Rajpal et al., PNAS. 24: 8466-8471 (2005) and Thie et al., Methods Mol Biol. 525:309-22 (2009) in conjugation with computation methods as demonstrated in Tiller et al., Front. Immunol. 8:986 (2017).

[0228] Chimeric immunoglobulins are the products of fused genes derived from different species; “humanized” chimeras generally have the framework region (FR) from human immunoglobulins and one or more CDRs are from a non-human source.

[0229] In certain aspects, portions of the heavy and/or light chain are identical or homologous to corresponding sequences from another particular species or belonging to a particular antibody class or subclass, while the remainder of the chain(s) is identical or homologous to corresponding sequences in antibodies derived from another species or belonging to another antibody class or subclass, as well as fragments of such antibodies, so long as they exhibit the desired biological activity. U.S. Pat. No. 4,816,567; and Morrison et al., Proc. Natl. Acad. Sci. USA 81:6851 (1984). For methods relating to chimeric antibodies, see, e.g., U.S. Pat. No. 4,816,567; and Morrison et al., Proc. Natl. Acad. Sci. USA 81:6851-6855 (1985), each of which are specifically incorporated herein by reference in their entirety. CDR grafting is described, for example, in U.S. Pat. Nos. 6,180,370, 5,693,762, 5,693,761, and 5,530,101, which are all hereby incorporated by reference for all purposes.

[0230] In some embodiments, minimizing the antibody polypeptide sequence from the non-human species optimizes chimeric antibody function and reduces immunogenicity. Specific amino acid residues from non-antigen recognizing regions of the non-human antibody are modified to be homologous to corresponding residues in a human antibody or isotype. One example is the “CDR-grafted” antibody, in which an antibody comprises one or more CDRs from a particular species or belonging to a specific antibody class or subclass, while the remainder of the antibody chain(s) is identical or homologous to a corresponding sequence in antibodies derived from another species or belonging to another antibody class or subclass. For use in humans, the V region composed of CDR1, CDR2, and partial CDR3 for both the light and heavy chain variance region from a non-human immunoglobulin, are grafted with a human antibody framework region, replacing the naturally occurring antigen receptors of the human antibody with the non-human CDRs. In some instances, corresponding non-human residues replace framework region residues of the human immunoglobulin. Furthermore, humanized antibodies may comprise residues that are not found in the recipient antibody or in the donor antibody to further refine performance. The humanized antibody may also comprise at least a portion of an immunoglobulin constant region (Fc), typically that of a human immunoglobulin. See, e.g., Jones et al., Nature 321:522 (1986); Riechmann et al., Nature 332:323 (1988); Presta, Curr. Op. Struct. Biol. 2:593 (1992); Vaswani and Hamilton, Ann. Allergy, Asthma and Immunol. 1:105 (1998); Harris, Biochem. Soc. Transactions 23; 1035 (1995); Hurle and Gross, Curr. Op. Biotech. 5:428 (1994); Verhoeyen et al., Science 239:1534-36 (1988).

[0231] Intrabodies are intracellularly localized immunoglobulins that bind to intracellular antigens as opposed to secreted antibodies, which bind antigens in the extracellular space.

[0232] Polyclonal antibody preparations typically include different antibodies against different determinants (epitopes). In order to produce polyclonal antibodies, a host, such as a rabbit or goat, is immunized with the antigen or antigen fragment, generally with an adjuvant and, if necessary, coupled to a carrier. Antibodies to the antigen are subsequently collected from the sera of the host. The polyclonal antibody can be affinity purified against the antigen rendering it monospecific.

[0233] Monoclonal antibodies or “mAb” refer to an antibody obtained from a population of homogeneous antibodies from an exclusive parental cell, e.g., the population is identical except for naturally occurring mutations that may be present in minor amounts. Each monoclonal antibody is directed against a single antigenic determinant.

[0234] B. Functional Antibody Fragments and Antigen-Binding Fragments

[0235] 1. Antigen-Binding Fragments

[0236] Certain aspects relate to antibody fragments, such as antibody fragments that bind to a SARS-CoV-2 spike protein. The term functional antibody fragment includes antigen-binding fragments of an antibody that retain the ability to specifically bind to an antigen. These fragments are constituted of various arrangements of the variable region heavy chain (VH) and/or light chain (VL); and in some embodiments, include constant region heavy chain 1 (CH1) and light chain (CL). In some embodiments, they lack the Fc region constituted of heavy chain 2 (CH2) and 3 (CH3) domains. Embodiments of antigen binding fragments and the modifications thereof may include: (i) the Fab fragment type constituted with the VL, VH, CL, and CH1 domains; (ii) the Fd fragment type constituted with the VH and CH1 domains; (iii) the Fv fragment type constituted with the VH and VL domains; (iv) the single domain fragment type, dAb, (Ward, 1989; McCafferty et al., 1990; Holt et al., 2003) constituted with a single VH or VL domain; (v) isolated complementarity determining region (CDR) regions. Such terms are described, for example, in Harlow and Lane, Antibodies: A Laboratory Manual, Cold Spring Harbor Laboratory, NY (1989); Molec. Biology and Biotechnology: A Comprehensive Desk Reference (Myers, R. A. (ed.), New York: VCH Publisher, Inc.); Huston et al., Cell Biophysics, 22:189-224 (1993); Pluckthun and Skerra, Meth. Enzymol., 178:497-515 (1989) and in Day, E. D., Advanced Immunochemistry, 2d ed., Wiley-Liss, Inc. New York, N.Y. (1990); Antibodies, 4:259-277 (2015), each of which are incorporated by reference.

[0237] Antigen-binding fragments also include fragments of an antibody that retain exactly, at least, or at most 1, 2, or 3 complementarity determining regions (CDRs) from a light chain variable region. Fusions of CDR-containing sequences to an Fc region (or a CH2 or CH3 region thereof) are included within the scope of this definition including, for example, scFv fused, directly or indirectly, to an Fc region are included herein.

[0238] The term Fab fragment (also “Fab”) means a monovalent antigen-binding fragment of an antibody containing the VL, VH, CL and CH1 domains. The term Fab′ fragment means a monovalent antigen-binding fragment of a monoclonal antibody that is larger than a Fab fragment. For example, a Fab′ fragment includes the VL, VH, CL and CH1 domains and all or part of the hinge region. The term F(ab′)2 fragment means a bivalent antigen-binding fragment of a monoclonal antibody comprising two Fab′ fragments linked by a disulfide bridge at the hinge region. An F(ab′)2 fragment includes, for example, all or part of the two VH and VL domains, and can further include all or part of the two CL and CH1 domains.

[0239] The term Fd fragment means a fragment of the heavy chain of a monoclonal antibody, which includes all or part of the VH, including the CDRs. An Fd fragment can further include CH1 region sequences.

[0240] The term Fv fragment means a monovalent antigen-binding fragment of a monoclonal antibody, including all or part of the VL and VH, and absent of the CL and CH1 domains. The VL and VH include, for example, the CDRs. Single-chain antibodies (sFv or scFv) are Fv molecules in which the VL and VH regions have been connected by a flexible linker to form a single polypeptide chain, which forms an antigen-binding fragment. Single chain antibodies are discussed in detail in International Patent Application Publication No. WO 88/01649 and U.S. Pat. Nos. 4,946,778 and 5,260,203, the disclosures of which are herein incorporated by reference. The term (scFv)2 means bivalent or bispecific sFv polypeptide chains that include oligomerization domains at their C-termini, separated from the sFv by a hinge region (Pack et al. 1992). The oligomerization domain comprises self-associating a-helices, e.g., leucine zippers, which can be further stabilized by additional disulfide bonds. (scFv)2 fragments are also known as “miniantibodies” or “minibodies.”

[0241] A single domain antibody is an antigen-binding fragment containing only a VH or the VL domain. In some instances, two or more VH regions are covalently joined with a peptide linker to create a bivalent domain antibody. The two VH regions of a bivalent domain antibody may target the same or different antigens.

[0242] 2. Fragment Antigen Binding Region, Fab

[0243] Fab polypeptides of the disclosure include the Fab antigen binding fragment of an antibody. Unless specifically stated otherwise, the term “Fab” relates to a polypeptide excluding the Fc portion of the antibody. The Fab may be conjugated to a polypeptide comprising other components, such as further antigen binding domains, costimulatory domains, linkers, peptide spacers, transmembrane domains, endodomains, and accessory proteins. Fab polypeptides can be generated using conventional techniques known in the art and are well-described in the literature.

[0244] 3. Fragment Crystallizable Region, Fc

[0245] An Fc region contains two heavy chain fragments comprising the CH2 and CH3 domains of an antibody. The two heavy chain fragments are held together by two or more disulfide bonds and by hydrophobic interactions of the CH3 domains. The term “Fc polypeptide” as used herein includes native and mutein forms of polypeptides derived from the Fc region of an antibody. Truncated forms of such polypeptides containing the hinge region that promotes dimerization are included.

[0246] C. Polypeptides with antibody CDRs & Scaffolding Domains that Display the CDRs

[0247] Antigen-binding peptide scaffolds, such as complementarity-determining regions (CDRs), are used to generate protein-binding molecules in accordance with the embodiments. Generally, a person skilled in the art can determine the type of protein scaffold on which to graft at least one of the CDRs. It is known that scaffolds, optimally, must meet a number of criteria such as: good phylogenetic conservation; known three-dimensional structure; small size; few or no post-transcriptional modifications; and/or be easy to produce, express, and purify. Skerra, J Mol Recognit, 13:167-87 (2000).

[0248] The protein scaffolds can be sourced from, but not limited to: fibronectin type III FN3 domain (known as “monobodies”), fibronectin type III domain 10, lipocalin, anticalin, Z-domain of protein A of Staphylococcus aureus, thioredoxin A or proteins with a repeated motif such as the “ankyrin repeat”, the “armadillo repeat”, the “leucine-rich repeat” and the “tetratricopeptide repeat”. Such proteins are described in US Patent Publication Nos. 2010/0285564, 2006/0058510, 2006/0088908, 2005/0106660, and PCT Publication No. WO2006/056464, each of which are specifically incorporated herein by reference in their entirety. Scaffolds derived from toxins from scorpions, insects, plants, mollusks, etc., and the protein inhibiters of neuronal NO synthase (PIN) may also be used.

[0249] D. Antibody Binding

[0250] The term “selective binding agent” refers to a molecule that binds to an antigen. Non-limiting examples include antibodies, antigen-binding fragments, scFv, Fab, Fab′, F(ab′)2, single chain antibodies, peptides, peptide fragments and proteins.

[0251] The term “binding” refers to a direct association between two molecules, due to, for example, covalent, electrostatic, hydrophobic, and ionic and/or hydrogen-bond interactions, including interactions such as salt bridges and water bridges. “Immunologically reactive” means that the selective binding agent or antibody of interest will bind with antigens present in a biological sample. The term “immune complex” refers the combination formed when an antibody or selective binding agent binds to an epitope on an antigen.

[0252] 1. Affinity/Avidity

[0253] The term “affinity” refers the strength with which an antibody or selective binding agent binds an epitope. In antibody binding reactions, this is expressed as the affinity constant (Ka or ka sometimes referred to as the association constant) for any given antibody or selective binding agent. Affinity is measured as a comparison of the binding strength of the antibody to its antigen relative to the binding strength of the antibody to an unrelated amino acid sequence. Affinity can be expressed as, for example, 20-fold greater binding ability of the antibody to its antigen then to an unrelated amino acid sequence. As used herein, the term “avidity” refers to the resistance of a complex of two or more agents to dissociation after dilution. The terms “immunoreactive” and “preferentially binds” are used interchangeably herein with respect to antibodies and/or selective binding agent.

[0254] There are several experimental methods that can be used by one skilled in the art to evaluate the binding affinity of any given antibody or selective binding agent for its antigen. This is generally done by measuring the equilibrium dissociation constant (KD or Kd), using the equation KD=koff/kon=[A] [B]/[AB]. The term koff is the rate of dissociation between the antibody and antigen per unit time, and is related to the concentration of antibody and antigen present in solution in the unbound form at equilibrium. The term kon is the rate of antibody and antigen association per unit time, and is related to the concentration of the bound antigen-antibody complex at equilibrium. The units used for measuring the KD are mol/L (molarity, or M), or concentration. The Ka of an antibody is the opposite of the KD, and is determined by the equation Ka=1/KD. Examples of some experimental methods that can be used to determine the KD value are: enzyme-linked immunosorbent assays (ELISA), isothermal titration calorimetry (ITC), fluorescence anisotropy, surface plasmon resonance (SPR), and affinity capillary electrophoresis (ACE). The affinity constant (Ka) of an antibody is the opposite of the KD, and is determined by the equation Ka=1/KD.

[0255] Antibodies deemed useful in certain embodiments may have an affinity constant (Ka) of about, at least about, or at most about 10⁶, 10⁷, 10⁸, 10⁹, or 10¹⁰ M or any range derivable therein. Similarly, in some embodiments, antibodies may have a dissociation constant of about, at least about or at most about 10⁻⁶, 10⁻⁷, 10⁻⁸, 10⁻⁹, 10⁻¹⁰ M, or any range derivable therein. These values are reported for antibodies discussed herein and the same assay may be used to evaluate the binding properties of such antibodies. An antibody of the invention is said to “specifically bind” its target antigen when the dissociation constant (KD) is ≥10⁻⁸ M. The antibody specifically binds antigen with “high affinity” when the KD is ≥5×10⁻⁹ M, and with “very high affinity” when the KD is ≤5×10⁻¹⁰ M.

[0256] 2. Epitope Specificity

[0257] The epitope of an antigen is the specific region of the antigen for which an antibody has binding affinity. In the case of protein or polypeptide antigens, the epitope is the specific residues (or specified amino acids or protein segment) that the antibody binds with high affinity. An antibody does not necessarily contact every residue within the protein. Nor does every single amino acid substitution or deletion within a protein necessarily affect binding affinity. For purposes of this specification and the accompanying claims, the terms “epitope” and “antigenic determinant” are used interchangeably to refer to the site on an antigen to which B and/or T cells respond or recognize. Polypeptide epitopes can be formed from both contiguous amino acids and noncontiguous amino acids juxtaposed by tertiary folding of a polypeptide. An epitope typically includes at least 3, and typically 5-10 amino acids in a unique spatial conformation.

[0258] Epitope specificity of an antibody can be determined in a variety of ways. One approach, for example, involves testing a collection of overlapping peptides of 15 amino acids spanning the full sequence of the protein and differing in increments of a small number of amino acids (e.g., 3 to 30 amino acids). The peptides are immobilized in separate wells of a microtiter dish. Immobilization can be accomplished, for example, by biotinylating one terminus of the peptides. This process may affect the antibody affinity for the epitope, therefore different samples of the same peptide can be biotinylated at the N and C terminus and immobilized in separate wells for the purposes of comparison. This is useful for identifying end-specific antibodies. Optionally, additional peptides can be included terminating at a particular amino acid of interest. This approach is useful for identifying end-specific antibodies to internal fragments. An antibody or antigen-binding fragment is screened for binding to each of the various peptides. The epitope is defined as a segment of amino acids that is common to all peptides to which the antibody shows high affinity binding.

[0259] 3. Modification of Antibody Antigen-Binding Domains

[0260] It is understood that the antibodies of the present invention may be modified, such that they are substantially identical to the antibody polypeptide sequences, or fragments thereof, and still bind the epitopes of the present invention. Polypeptide sequences are “substantially identical” when optimally aligned using such programs as Clustal Omega, IGBLAST, GAP or BESTFIT using default gap weights, they share at least 80% sequence identity, at least 90% sequence identity, at least 95% sequence identity, at least 96% sequence identity, at least 97% sequence identity, at least 98% sequence identity, or at least 99% sequence identity or any range therein.

[0261] As discussed herein, minor variations in the amino acid sequences of antibodies or antigen-binding regions thereof are contemplated as being encompassed by the present invention, providing that the variations in the amino acid sequence maintain at least 75%, more preferably at least 80%, at least 90%, at least 95%, at least 96%, at least 97%, at least 98% and most preferably at least 99% sequence identity. In particular, conservative amino acid replacements are contemplated.

[0262] Conservative replacements are those that take place within a family of amino acids that are related in their side chains. Genetically encoded amino acids are generally divided into families based on the chemical nature of the side chain; e.g., acidic (aspartate, glutamate), basic (lysine, arginine, histidine), nonpolar (alanine, valine, leucine, isoleucine, proline, phenylalanine, methionine, tryptophan), and uncharged polar (glycine, asparagine, glutamine, cysteine, serine, threonine, tyrosine). For example, it is reasonable to expect that an isolated replacement of a leucine moiety with an isoleucine or valine moiety, or a similar replacement of an amino acid with a structurally related amino acid in the same family, will not have a major effect on the binding or properties of the resulting molecule, especially if the replacement does not involve an amino acid within a framework site. Whether an amino acid change results in a functional peptide can readily be determined by assaying the specific activity of the polypeptide derivative. Standard ELISA, Surface Plasmon Resonance (SPR), or other antibody binding assays can be performed by one skilled in the art to make a quantitative comparison of antigen binging affinity between the unmodified antibody and any polypeptide derivatives with conservative substitutions generated through any of several methods available to one skilled in the art.

[0263] Fragments or analogs of antibodies or immunoglobulin molecules can be readily prepared by those skilled in the art. Preferred amino- and carboxy-termini of fragments or analogs occur near boundaries of functional domains. Structural and functional domains can be identified by comparison of the nucleotide and/or amino acid sequence data to public or proprietary sequence databases. Preferably, computerized comparison methods are used to identify sequence motifs or predicted protein conformation domains that occur in other proteins of known structure and/or function. Standard methods to identify protein sequences that fold into a known three-dimensional structure are available to those skilled in the art; Dill and McCallum., Science 338:1042-1046 (2012). Several algorithms for predicting protein structures and the gene sequences that encode these have been developed, and many of these algorithms can be found at the National Center for Biotechnology Information (on the World Wide Web at ncbi.nlm.nih.gov/guide/proteins/) and at the Bioinformatics Resource Portal (on the World Wide Web at expasy.org/proteomics). Thus, the foregoing examples demonstrate that those of skill in the art can recognize sequence motifs and structural conformations that may be used to define structural and functional domains in accordance with the invention.

[0264] Framework modifications can be made to antibodies to decrease immunogenicity, for example, by “backmutating” one or more framework residues to a corresponding germline sequence.

[0265] It is also contemplated that the antigen-binding domain may be multi-specific or multivalent by multimerizing the antigen-binding domain with VH and VL region pairs that bind either the same antigen (multi-valent) or a different antigen (multi-specific).

[0266] E. Chemical Modification of Antibodies

[0267] In some aspects, also contemplated are glycosylation variants of antibodies, wherein the number and/or type of glycosylation site(s) has been altered compared to the amino acid sequences of the parent polypeptide. Glycosylation of the polypeptides can be altered, for example, by modifying one or more sites of glycosylation within the polypeptide sequence to increase the affinity of the polypeptide for antigen (U.S. Pat. Nos. 5,714,350 and 6,350,861). In certain embodiments, antibody protein variants comprise a greater or a lesser number of N-linked glycosylation sites than the native antibody. An N-linked glycosylation site is characterized by the sequence: Asn-X-Ser or Asn-X-Thr, wherein the amino acid residue designated as X may be any amino acid residue except proline. The substitution of amino acid residues to create this sequence provides a potential new site for the addition of an N-linked carbohydrate chain. Alternatively, substitutions that eliminate or alter this sequence will prevent addition of an N-linked carbohydrate chain present in the native polypeptide. For example, the glycosylation can be reduced by the deletion of an Asn or by substituting the Asn with a different amino acid. In other embodiments, one or more new N-linked glycosylation sites are created. Antibodies typically have an N-linked glycosylation site in the Fc region.

[0268] Additional antibody variants include cysteine variants, wherein one or more cysteine residues in the parent or native amino acid sequence are deleted from or substituted with another amino acid (e.g., serine). Cysteine variants are useful, inter alia, when antibodies must be refolded into a biologically active conformation. Cysteine variants may have fewer cysteine residues than the native antibody and typically have an even number to minimize interactions resulting from unpaired cysteines.

[0269] In some aspects, the polypeptides can be pegylated to increase biological half-life by reacting the polypeptide with polyethylene glycol (PEG) or a reactive ester or aldehyde derivative of PEG, under conditions in which one or more PEG groups become attached to the polypeptide. Polypeptide pegylation may be carried out by an acylation reaction or an alkylation reaction with a reactive PEG molecule (or an analogous reactive water-soluble polymer). Methods for pegylating proteins are known in the art and can be applied to the polypeptides of the invention to obtain PEGylated derivatives of antibodies. See, e.g., EP 0 154 316 and EP 0 401 384. In some aspects, the antibody is conjugated or otherwise linked to transthyretin (TTR) or a TTR variant. The TTR or TTR variant can be chemically modified with, for example, a chemical selected from the group consisting of dextran, poly(n-vinyl pyrrolidone), polyethylene glycols, propropylene glycol homopolymers, polypropylene oxide/ethylene oxide co-polymers, polyoxyethylated polyols, and polyvinyl alcohols. As used herein, the term “polyethylene glycol” is intended to encompass any of the forms of PEG that have been used to derivatize other proteins.

[0270] 1. Conjugation

[0271] Derivatives of the antibodies and antigen binding fragments that are described herein are also provided. The derivatized antibody or fragment thereof may comprise any molecule or substance that imparts a desired property to the antibody or fragment. The derivatized antibody can comprise, for example, a detectable (or labeling) moiety (e.g., a radioactive, colorimetric, antigenic, or enzymatic molecule, or a detectable bead), a molecule that binds to another molecule (e.g., biotin or streptavidin), a therapeutic or diagnostic moiety (e.g., a radioactive, cytotoxic, or pharmaceutically active moiety), or a molecule that increases the suitability of the antibody for a particular use (e.g., administration to a subject, such as a human subject, or other in vivo or in vitro uses).

[0272] Optionally, an antibody or an immunological portion of an antibody can be chemically conjugated to, or expressed as, a fusion protein with other proteins. In some aspects, polypeptides may be chemically modified by conjugating or fusing the polypeptide to serum protein, such as human serum albumin, to increase half-life of the resulting molecule. See, e.g., EP 0322094 and EP 0 486 525. In some aspects, the polypeptides may be conjugated to a diagnostic agent and used diagnostically, for example, to monitor the development or progression of a disease and determine the efficacy of a given treatment regimen. In some aspects, the polypeptides may also be conjugated to a therapeutic agent to provide a therapy in combination with the therapeutic effect of the polypeptide. Additional suitable conjugated molecules include ribonuclease (RNase), DNase I, an anti sense nucleic acid, an inhibitory RNA molecule such as a siRNA molecule, an immunostimulatory nucleic acid, aptamers, ribozymes, triplex forming molecules, and external guide sequences. The functional nucleic acid molecules may act as effectors, inhibitors, modulators, and stimulators of a specific activity possessed by a target molecule, or the functional nucleic acid molecules may possess a de novo activity independent of any other molecules.

[0273] In some aspects, disclosed are antibodies and antibody-like molecules that are linked to at least one agent to form an antibody conjugate or payload. In order to increase the efficacy of antibody molecules as diagnostic or therapeutic agents, it is conventional to link or covalently bind or complex at least one desired molecule or moiety. Such a molecule or moiety may be, but is not limited to, at least one effector or reporter molecule. Effector molecules comprise molecules having a desired activity, e.g., cytotoxic activity. Non-limiting examples of effector molecules include toxins, therapeutic enzymes, antibiotics, radiolabeled nucleotides and the like. By contrast, a reporter molecule is defined as any moiety that may be detected using an assay. Non-limiting examples of reporter molecules that have been conjugated to antibodies include enzymes, radiolabels, haptens, fluorescent labels, phosphorescent molecules, chemiluminescent molecules, chromophores, luminescent molecules, photoaffinity molecules, colored particles, or ligands.

[0274] a. Conjugate Types

[0275] Certain examples of antibody conjugates are those conjugates in which the antibody is linked to a detectable label. “Detectable labels” are compounds and/or elements that can be detected due to their specific functional properties, and/or chemical characteristics, the use of which allows the antibody to be detected, and/or further quantified if desired. Examples of detectable labels include, but not limited to, radioactive isotopes, fluorescers, semiconductor nanocrystals, chemiluminescers, chromophores, enzymes, enzyme substrates, enzyme cofactors, enzyme inhibitors, dyes, metal ions, metal sols, ligands (e.g., biotin, streptavidin or haptens) and the like. Particular examples of labels are, but not limited to, horseradish peroxidase (HRP), fluorescein, FITC, rhodamine, dansyl, umbelliferone, dimethyl acridinium ester (DMAE), Texas red, luminol, NADPH and α- or β-galactosidase. Antibody conjugates include those intended primarily for use in vitro, where the antibody is linked to a secondary binding ligand and/or to an enzyme to generate a colored product upon contact with a chromogenic substrate. Examples of suitable enzymes include, but are not limited to, urease, alkaline phosphatase, (horseradish) hydrogen peroxidase, or glucose oxidase. Preferred secondary binding ligands are biotin and/or avidin and streptavidin compounds. The uses of such labels is well known to those of skill in the art and are described, for example, in U.S. Pat. Nos. 3,817,837; 3,850,752; 3,939,350; 3,996,345; 4,277,437; 4,275,149 and 4,366,241; each incorporated herein by reference. Molecules containing azido groups may also be used to form covalent bonds to proteins through reactive nitrene intermediates that are generated by low intensity ultraviolet light (Potter & Haley, 1983).

[0276] In some aspects, contemplated are immunoconjugates comprising an antibody or antigen-binding fragment thereof conjugated to a cytotoxic agent such as a chemotherapeutic agent, a drug, a growth inhibitory agent, a toxin (e.g., an enzymatically active toxin of bacterial, fungal, plant, or animal origin, or fragments thereof), or a radioactive isotope (i.e., a radioconjugate). In this way, the agent of interest can be targeted directly to cells bearing cell surface antigen. The antibody and agent may be associated through non-covalent interactions such as through electrostatic forces, or by covalent bonds. Various linkers, known in the art, can be employed in order to form the immunoconjugate. Additionally, the immunoconjugate can be provided in the form of a fusion protein. In one aspect, an antibody may be conjugated to various therapeutic substances in order to target the cell surface antigen. Examples of conjugated agents include, but are not limited to, metal chelate complexes, drugs, toxins and other effector molecules, such as cytokines, lymphokines, chemokines, immunomodulators, radiosensitizers, asparaginase, carboranes, and radioactive halogens.

[0277] In antibody drug conjugates (ADC), an antibody (Ab) is conjugated to one or more drug moieties (D) through a linker (L). The ADC may be prepared by several routes, employing organic chemistry reactions, conditions, and reagents known to those skilled in the art, including: (1) reaction of a nucleophilic group of an antibody with a bivalent linker reagent, to form Ab-L, via a covalent bond, followed by reaction with a drug moiety D; and (2) reaction of a nucleophilic group of a drug moiety with a bivalent linker reagent, to form D-L, via a covalent bond, followed by reaction with the nucleophilic group of an antibody. Antibody drug conjugates may also be produced by modification of the antibody to introduce electrophilic moieties, which can react with nucleophilic substituents on the linker reagent or drug. Alternatively, a fusion protein comprising the antibody and cytotoxic agent may be made, e.g., by recombinant techniques or peptide synthesis. The length of DNA may comprise respective regions encoding the two portions of the conjugate either adjacent one another or separated by a region encoding a linker peptide which does not destroy the desired properties of the conjugate. In yet another aspect, the antibody may be conjugated to a “receptor” (such as streptavidin) for utilization in tumor or cancer cell pre-targeting wherein the antibody-receptor conjugate is administered to the patient, followed by removal of unbound conjugate from the circulation using a clearing agent and then administration of a “ligand” (e.g., avidin) which is conjugated to a cytotoxic agent (e.g., a radionucleotide).

[0278] Examples of an antibody-drug conjugates known to a person skilled in the art are pro-drugs useful for the local delivery of cytotoxic or cytostatic agents, i.e. drugs to kill or inhibit tumor cells in the treatment of cancer (Syrigos and Epenetos, Anticancer Res. 19:605-614 (1999); Niculescu-Duvaz and Springer, Adv. Drg. Del. Rev. 26:151-172 (1997); U.S. Pat. No. 4,975,278). In contrast, systematic administration of these unconjugated drug agents may result in unacceptable levels of toxicity to normal cells as well as the target tumor cells (Baldwin et al., Lancet 1:603-5 (1986); Thorpe, (1985) “Antibody Carriers of Cytotoxic Agents in Cancer Therapy: A Review,” In: Monoclonal Antibodies '84: Biological and Clinical Applications, A. Pincera et al., (eds.) pp. 475-506). Both polyclonal antibodies and monoclonal antibodies have been reported as useful in these strategies (Rowland et al., Cancer Immunol. Immunother. 21:183-87 (1986)).

[0279] In certain aspects, ADC include covalent or aggregative conjugates of antibodies, or antigen-binding fragments thereof, with other proteins or polypeptides, such as by expression of recombinant fusion proteins comprising heterologous polypeptides fused to the N-terminus or C-terminus of an antibody polypeptide. For example, the conjugated peptide may be a heterologous signal (or leader) polypeptide, e.g., the yeast alpha-factor leader, or a peptide such as an epitope tag (e.g., V5-His). Antibody-containing fusion proteins may comprise peptides added to facilitate purification or identification of the antibody (e.g., poly-His). An antibody polypeptide also can be linked to the FLAG® (Sigma-Aldrich, St. Louis, Mo.) peptide as described in Hopp et al., Bio/Technology 6:1204 (1988), and U.S. Pat. No. 5,011,912. Oligomers that contain one or more antibody polypeptides may be employed as antagonists. Oligomers may be in the form of covalently linked or non-covalently linked dimers, trimers, or higher oligomers. Oligomers comprising two or more antibody polypeptides are contemplated for use. Other oligomers include heterodimers, homotrimers, heterotrimers, homotetramers, heterotetramers, etc. In certain aspects, oligomers comprise multiple antibody polypeptides joined via covalent or non-covalent interactions between peptide moieties fused to the antibody polypeptides. Such peptides may be peptide linkers (spacers), or peptides that have the property of promoting oligomerization. Leucine zippers and certain polypeptides derived from antibodies are among the peptides that can promote oligomerization of antibody polypeptides attached thereto, as described in more detail below.

[0280] b. Conjugation Methodology

[0281] Several methods are known in the art for the attachment or conjugation of an antibody to its conjugate moiety. Some attachment methods involve the use of a metal chelate complex employing, for example, an organic chelating agent such a diethylenetriaminepentaacetic acid anhydride (DTPA); ethylenetriaminetetraacetic acid; N-chloro-p-toluenesulfonamide; and/or tetrachloro-3-6-diphenylglycouril-3 attached to the antibody (U.S. Pat. Nos. 4,472,509 and 4,938,948, each incorporated herein by reference). Monoclonal antibodies may also be reacted with an enzyme in the presence of a coupling agent such as glutaraldehyde or periodate. Conjugates may also be made using a variety of bifunctional protein-coupling agents such as N-succinimidyl-3-(2-pyridyldithiol) propionate (SPDP), iminothiolane (IT), bifunctional derivatives of imidoesters (such as dimethyl adipimidate HCl), active esters (such as disuccinimidyl suberate), aldehydes (such as glutaraldehyde), bis-azido compounds (such as bis(p-azidobenzoyl)hexanediamine), bis-diazonium derivatives (such as bos(p-diazoniumbenzoyl)-ethylenediamine), diisocyanates (such as toluene 2,6-diisocyanate), and bis-active fluorine compounds (such as 1,5-difluoro-2,4-dinitrobenzene). In some aspects, derivatization of immunoglobulins by selectively introducing sulfhydryl groups in the Fc region of an immunoglobulin, using reaction conditions that do not alter the antibody combining site, are contemplated. Antibody conjugates produced according to this methodology are disclosed to exhibit improved longevity, specificity, and sensitivity (U.S. Pat. No. 5,196,066, incorporated herein by reference). Site-specific attachment of effector or reporter molecules, wherein the reporter or effector molecule is conjugated to a carbohydrate residue in the Fc region has also been disclosed in the literature (O'Shannessy et al., 1987).

### II. Antibody Production

[0282] A. Antibody Production

[0283] Methods for preparing and characterizing antibodies for use in diagnostic and detection assays, for purification, and for use as therapeutics are well known in the art as disclosed in, for example, U.S. Pat. Nos. 4,011,308; 4,722,890; 4,016,043; 3,876,504; 3,770,380; and 4,372,745 (see, e.g., Antibodies: A Laboratory Manual, Cold Spring Harbor Laboratory, 1988; incorporated herein by reference). These antibodies may be polyclonal or monoclonal antibody preparations, monospecific antisera, human antibodies, hybrid or chimeric antibodies, such as humanized antibodies, altered antibodies, F(ab′)2 fragments, Fab fragments, Fv fragments, single-domain antibodies, dimeric or trimeric antibody fragment constructs, minibodies, or functional fragments thereof which bind to the antigen in question. In certain aspects, polypeptides, peptides, and proteins and immunogenic fragments thereof for use in various embodiments can also be synthesized in solution or on a solid support in accordance with conventional techniques. See, for example, Stewart and Young, (1984); Tarn et al, (1983); Merrifield, (1986); and Barany and Merrifield (1979), each incorporated herein by reference.

[0284] Briefly, a polyclonal antibody is prepared by immunizing an animal with an antigen or a portion thereof and collecting antisera from that immunized animal. The antigen may be altered compared to an antigen sequence found in nature. In some embodiments, a variant or altered antigenic peptide or polypeptide is employed to generate antibodies. Inocula are typically prepared by dispersing the antigenic composition in a physiologically tolerable diluent to form an aqueous composition. Anti sera is subsequently collected by methods known in the arts, and the serum may be used as-is for various applications or else the desired antibody fraction may be purified by well-known methods, such as affinity chromatography (Harlow and Lane, Antibodies: A Laboratory Manual 1988).

[0285] Methods of making monoclonal antibodies are also well known in the art (Kohler and Milstein, 1975; Harlow and Lane, 1988, U.S. Pat. No. 4,196,265, herein incorporated by reference in its entirety for all purposes). Typically, this technique involves immunizing a suitable animal with a selected immunogenic composition, e.g., a purified or partially purified protein, polypeptide, peptide or domain. Resulting antibody-producing B-cells from the immunized animal, or all dissociated splenocytes, are then induced to fuse with cells from an immortalized cell line to form hybridomas. Myeloma cell lines suited for use in hybridoma-producing fusion procedures preferably are non-antibody-producing and have high fusion efficiency and enzyme deficiencies that render then incapable of growing in certain selective media that support the growth of only the desired fused cells (hybridomas). Typically, the fusion partner includes a property that allows selection of the resulting hybridomas using specific media. For example, fusion partners can be hypoxanthine/aminopterin/thymidine (HAT)-sensitive. Methods for generating hybrids of antibody-producing spleen or lymph node cells and myeloma cells usually comprise mixing somatic cells with myeloma cells in the presence of an agent or agents (chemical or electrical) that promote the fusion of cell membranes. Next, selection of hybridomas can be performed by culturing the cells by single-clone dilution in microtiter plates, followed by testing the individual clonal supernatants (after two to three weeks) for the desired reactivity. Fusion procedures for making hybridomas, immunization protocols, and techniques for isolation of immunized splenocytes for fusion are known in the art.

[0286] Other techniques for producing monoclonal antibodies include the viral or oncogenic transformation of B-lymphocytes, a molecular cloning approach may be used to generate a nucleic acid or polypeptide, the selected lymphocyte antibody method (SLAM) (see, e.g., Babcook et al., Proc. Natl. Acad. Sci. USA 93:7843-7848 (1996), the preparation of combinatorial immunoglobulin phagemid libraries from RNA isolated from the spleen of the immunized animal and selection of phagemids expressing appropriate antibodies, or producing a cell expressing an antibody from a genomic sequence of the cell comprising a modified immunoglobulin locus using Cre-mediated site-specific recombination (see, e.g., U.S. Pat. No. 6,091,001).

[0287] Monoclonal antibodies may be further purified using filtration, centrifugation, and various chromatographic methods such as HPLC or affinity chromatography. Monoclonal antibodies may be further screened or optimized for properties relating to specificity, avidity, half-life, immunogenicity, binding association, binding disassociation, or overall functional properties relative to being a treatment for infection. Thus, monoclonal antibodies may have alterations in the amino acid sequence of CDRs, including insertions, deletions, or substitutions with a conserved or non-conserved amino acid.

[0288] The immunogenicity of a particular immunogen composition can be enhanced by the use of non-specific stimulators of the immune response, known as adjuvants. Adjuvants that may be used in accordance with embodiments include, but are not limited to, IL-1, IL-2, IL-4, IL-7, IL-12, -interferon, GMCSP, BCG, aluminum hydroxide, MDP compounds, such as thur-MDP and nor-MDP, CGP (MTP-PE), lipid A, and monophosphoryl lipid A (MPL). Exemplary adjuvants may include complete Freund's adjuvant (a non-specific stimulator of the immune response containing killed Mycobacterium tuberculosis), incomplete Freund's adjuvants, and/or aluminum hydroxide adjuvant. In addition to adjuvants, it may be desirable to co-administer biologic response modifiers (BRM), such as but not limited to, Cimetidine (CIM; 1200 mg/d) (Smith/Kline, PA); low-dose Cyclophosphamide (CYP; 300 mg/m2) (Johnson/Mead, NJ), cytokines such as β-interferon, IL-2, or IL-12, or genes encoding proteins involved in immune helper functions, such as B-7.A phage-display system can be used to expand antibody molecule populations in vitro. Saiki, et al., Nature 324:163 (1986); Scharf et al., Science 233:1076 (1986); U.S. Pat. Nos. 4,683,195 and 4,683,202; Yang et al., J Mol Biol. 254:392 (1995); Barbas, III et al., Methods: Comp. Meth Enzymol. (1995) 8:94; Barbas, III et al., Proc Natl Acad Sci USA 88:7978 (1991).

[0289] B. Fully Human Antibody Production

[0290] Methods are available for making fully human antibodies. Using fully human antibodies can minimize the immunogenic and allergic responses that may be caused by administering non-human monoclonal antibodies to humans as therapeutic agents. In one embodiment, human antibodies may be produced in a non-human transgenic animal, e.g., a transgenic mouse capable of producing multiple isotypes of human antibodies to protein (e.g., IgG, IgA, and/or IgE) by undergoing V-D-J recombination and isotype switching. Accordingly, this aspect applies to antibodies, antibody fragments, and pharmaceutical compositions thereof, but also non-human transgenic animals, B-cells, host cells, and hybridomas that produce monoclonal antibodies. Applications of human antibodies include, but are not limited to, detect a cell expressing an anticipated protein, either in vivo or in vitro, pharmaceutical preparations containing the antibodies of the present invention, and methods of treating disorders by administering the antibodies.

[0291] Fully human antibodies can be produced by immunizing transgenic animals (usually mice) that are capable of producing a repertoire of human antibodies in the absence of endogenous immunoglobulin production. Antigens for this purpose typically have six or more contiguous amino acids, and optionally are conjugated to a carrier, such as a hapten. See, for example, Jakobovits et al., Proc. Natl. Acad. Sci. USA 90:2551-2555 (1993); Jakobovits et al., Nature 362:255-258 (1993); Bruggermann et al., Year in Immunol. 7:33 (1993). In one example, transgenic animals are produced by incapacitating the endogenous mouse immunoglobulin loci encoding the mouse heavy and light immunoglobulin chains therein, and inserting into the mouse genome large fragments of human genome DNA containing loci that encode human heavy and light chain proteins. Partially modified animals, which have less than the full complement of human immunoglobulin loci, are then crossbred to obtain an animal having all of the desired immune system modifications. When administered an immunogen, these transgenic animals produce antibodies that are immunospecific for the immunogen but have human rather than murine amino acid sequences, including the variable regions. For further details of such methods, see, for example, International Patent Application Publication Nos. WO 96/33735 and WO 94/02602, which are hereby incorporated by reference in their entirety. Additional methods relating to transgenic mice for making human antibodies are described in U.S. Pat. Nos. 5,545,807; 6,713,610; 6,673,986; 6,162,963; 6,300,129; 6,255,458; 5,877,397; 5,874,299 and 5,545,806; in International Patent Application Publication Nos. WO 91/10741 and WO 90/04036; and in European Patent Nos. EP 546073B1 and EP 546073A1, all of which are hereby incorporated by reference in their entirety for all purposes.

[0292] The transgenic mice described above, referred to herein as “HuMAb” mice, contain a human immunoglobulin gene minilocus that encodes unrearranged human heavy (μ and γ) and κ light chain immunoglobulin sequences, together with targeted mutations that inactivate the endogenous μ and κ chain loci (Lonberg et al., Nature 368:856-859 (1994)). Accordingly, the mice exhibit reduced expression of mouse IgM or κ chains and in response to immunization, the introduced human heavy and light chain transgenes undergo class switching and somatic mutation to generate high affinity human IgG κ monoclonal antibodies (Lonberg et al., supra; Lonberg and Huszar, Intern. Ref. Immunol. 13:65-93 (1995); Harding and Lonberg, Ann. N.Y. Acad. Sci. 764:536-546 (1995)). The preparation of HuMAb mice is described in detail in Taylor et al., Nucl. Acids Res. 20:6287-6295 (1992); Chen et al., Int. Immunol. 5:647-656 (1993); Tuaillon et al., J. Immunol. 152:2912-2920 (1994); Lonberg et al., supra; Lonberg, Handbook of Exp. Pharmacol. 113:49-101 (1994); Taylor et al., Int. Immunol. 6:579-591 (1994); Lonberg and Huszar, Intern. Ref. Immunol. 13:65-93 (1995); Harding and Lonberg, Ann. N.Y. Acad. Sci. 764:536-546 (1995); Fishwild et al., Nat. Biotechnol. 14:845-851 (1996); the foregoing references are herein incorporated by reference in their entirety for all purposes. See further, U.S. Pat. Nos. 5,545,806; 5,569,825; 5,625,126; 5,633,425; 5,789,650; 5,877,397; 5,814,318; 5,874,299; 5,770,429; and 5,545,807; as well as International Patent Application Publication Nos. WO 93/1227; WO 92/22646; and WO 92/03918, the disclosures of all of which are hereby incorporated by reference in their entirety for all purposes. Technologies utilized for producing human antibodies in these transgenic mice are disclosed also in WO 98/24893, and Mendez et al., Nat. Genetics 15:146-156 (1997), which are herein incorporated by reference. For example, the HCo7 and HCo12 transgenic mice strains can be used to generate human antibodies.

[0293] Using hybridoma technology, antigen-specific humanized monoclonal antibodies with the desired specificity can be produced and selected from the transgenic mice such as those described above. Such antibodies may be cloned and expressed using a suitable vector and host cell, or the antibodies can be harvested from cultured hybridoma cells. Fully human antibodies can also be derived from phage-display libraries (as disclosed in Hoogenboom et al., J. Mol. Biol. 227:381 (1991); and Marks et al., J. Mol. Biol. 222:581 (1991)). One such technique is described in International Patent Application Publication No. WO 99/10494 (herein incorporated by reference), which describes the isolation of high affinity and functional agonistic antibodies for MPL- and msk-receptors using such an approach.

[0294] C. Antibody Fragments Production

[0295] Antibody fragments that retain the ability to recognize the antigen of interest will also find use herein. A number of antibody fragments are known in the art that comprise antigen-binding sites capable of exhibiting immunological binding properties of an intact antibody molecule and can be subsequently modified by methods known in the arts. Functional fragments, including only the variable regions of the heavy and light chains, can also be produced using standard techniques such as recombinant production or preferential proteolytic cleavage of immunoglobulin molecules. These fragments are known as Fv. See, e.g., Inbar et al., Proc. Nat. Acad. Sci. USA 69:2659-2662 (1972); Hochman et al., Biochem. 15:2706-2710 (1976); and Ehrlich et al., Biochem. 19:4091-4096 (1980).

[0296] Single-chain variable fragments (scFvs) may be prepared by fusing DNA encoding a peptide linker between DNAs encoding the two variable domain polypeptides (VL and VH). scFvs can form antigen-binding monomers, or they can form multimers (e.g., dimers, trimers, or tetramers), depending on the length of a flexible linker between the two variable domains (Kortt et al., Prot. Eng. 10:423 (1997); Kort et al., Biomol. Eng. 18:95-108 (2001)). By combining different VL- and VH-comprising polypeptides, one can form multimeric scFvs that bind to different epitopes (Kriangkum et al., Biomol. Eng. 18:31-40 (2001)). Antigen-binding fragments are typically produced by recombinant DNA methods known to those skilled in the art. Although the two domains of the Fv fragment, VL and VH, are coded for by separate genes, they can be joined using recombinant methods by a synthetic linker that enables them to be made as a single chain polypeptide (known as single chain Fv (sFv or scFv); see e.g., Bird et al., Science 242:423-426 (1988); and Huston et al., Proc. Natl. Acad. Sci. USA 85:5879-5883 (1988). Design criteria include determining the appropriate length to span the distance between the C-terminus of one chain and the N-terminus of the other, wherein the linker is generally formed from small hydrophilic amino acid residues that do not tend to coil or form secondary structures. Suitable linkers generally comprise polypeptide chains of alternating sets of glycine and serine residues, and may include glutamic acid and lysine residues inserted to enhance solubility. Antigen-binding fragments are screened for utility in the same manner as intact antibodies. Such fragments include those obtained by amino-terminal and/or carboxy-terminal deletions, where the remaining amino acid sequence is substantially identical to the corresponding positions in the naturally occurring sequence deduced, for example, from a full-length cDNA sequence.

[0297] Antibodies may also be generated using peptide analogs of the epitopic determinants disclosed herein, which may consist of non-peptide compounds having properties analogous to those of the template peptide. These types of non-peptide compound are termed “peptide mimetics” or “peptidomimetics”. Fauchere, J. Adv. Drug Res. 15:29 (1986); Veber and Freidinger TINS p. 392 (1985); and Evans et al., J. Med. Chem. 30:1229 (1987). Liu et al. (2003) also describe “antibody like binding peptidomimetics” (ABiPs), which are peptides that act as pared-down antibodies and have certain advantages of longer serum half-life as well as less cumbersome synthesis methods. These analogs can be peptides, non-peptides or combinations of peptide and non-peptide regions. Fauchere, Adv. Drug Res. 15:29 (1986); Veber and Freidiner, TINS p. 392 (1985); and Evans et al., J. Med. Chem. 30:1229 (1987), which are incorporated herein by reference in their entirety for any purpose. Peptide mimetics that are structurally similar to therapeutically useful peptides may be used to produce a similar therapeutic or prophylactic effect. Such compounds are often developed with the aid of computerized molecular modeling. Generally, peptidomimetics of the invention are proteins that are structurally similar to an antibody displaying a desired biological activity, such as the ability to bind a protein, but have one or more peptide linkages optionally replaced by a linkage selected from: —CH2NH—, —CH2S—, —CH2—CH2—, —CH═CH— (cis and trans), —COCH2—, —CH(OH)CH2—, and —CH2SO— by methods well known in the art. Systematic substitution of one or more amino acids of a consensus sequence with a D-amino acid of the same type (e.g., D-lysine in place of L-lysine) may be used in certain embodiments of the invention to generate more stable proteins. In addition, constrained peptides comprising a consensus sequence or a substantially identical consensus sequence variation may be generated by methods known in the art (Rizo and Gierasch, Ann. Rev. Biochem. 61:387 (1992), incorporated herein by reference), for example, by adding internal cysteine residues capable of forming intramolecular disulfide bridges which cyclize the peptide.

[0298] Once generated, a phage display library can be used to improve the immunological binding affinity of the Fab molecules using known techniques. See, e.g., Figini et al., J. Mol. Biol. 239:68 (1994). The coding sequences for the heavy and light chain portions of the Fab molecules selected from the phage display library can be isolated or synthesized and cloned into any suitable vector or replicon for expression. Any suitable expression system can be used.

### III. Obtaining Encoded Antibodies

[0299] In some aspects, there are nucleic acid molecule encoding antibody polypeptides (e.g., heavy or light chain, variable domain only, or full-length). These may be generated by methods known in the art, e.g., isolated from B cells of mice that have been immunized and isolated, phage display, expressed in any suitable recombinant expression system and allowed to assemble to form antibody molecules.

[0300] A. Expression

[0301] The nucleic acid molecules may be used to express large quantities of recombinant antibodies or to produce chimeric antibodies, single chain antibodies, immunoadhesins, diabodies, mutated antibodies, and other antibody derivatives. If the nucleic acid molecules are derived from a non-human, non-transgenic animal, the nucleic acid molecules may be used for antibody humanization.

[0302] 1. Vectors

[0303] In some aspects, contemplated are expression vectors comprising a nucleic acid molecule encoding a polypeptide of the desired sequence or a portion thereof (e.g., a fragment containing one or more CDRs or one or more variable region domains). Expression vectors comprising the nucleic acid molecules may encode the heavy chain, light chain, or the antigen-binding portion thereof. In some aspects, expression vectors comprising nucleic acid molecules may encode fusion proteins, modified antibodies, antibody fragments, and probes thereof. In addition to control sequences that govern transcription and translation, vectors and expression vectors may contain nucleic acid sequences that serve other functions as well.

[0304] To express the antibodies, or antigen-binding fragments thereof, DNAs encoding partial or full-length light and heavy chains are inserted into expression vectors such that the gene area is operatively linked to transcriptional and translational control sequences. In some aspects, a vector that encodes a functionally complete human CH or CL immunoglobulin sequence with appropriate restriction sites engineered so that any VH or VL sequence can be easily inserted and expressed. Typically, expression vectors used in any of the host cells contain sequences for plasmid or virus maintenance and for cloning and expression of exogenous nucleotide sequences. Such sequences, collectively referred to as “flanking sequences” typically include one or more of the following operatively linked nucleotide sequences: a promoter, one or more enhancer sequences, an origin of replication, a transcriptional termination sequence, a complete intron sequence containing a donor and acceptor splice site, a sequence encoding a leader sequence for polypeptide secretion, a ribosome binding site, a polyadenylation sequence, a polylinker region for inserting the nucleic acid encoding the polypeptide to be expressed, and a selectable marker element. Such sequences and methods of using the same are well known in the art.

[0305] 2. Expression Systems

[0306] Numerous expression systems exist that comprise at least a part or all of the expression vectors discussed above. Prokaryote- and/or eukaryote-based systems can be employed for use with an embodiment to produce nucleic acid sequences, or their cognate polypeptides, proteins and peptides. Commercially and widely available systems include in but are not limited to bacterial, mammalian, yeast, and insect cell systems. Different host cells have characteristic and specific mechanisms for the post-translational processing and modification of proteins. Appropriate cell lines or host systems can be chosen to ensure the correct modification and processing of the foreign protein expressed. Those skilled in the art are able to express a vector to produce a nucleic acid sequence or its cognate polypeptide, protein, or peptide using an appropriate expression system.

[0307] 3. Methods of Gene Transfer

[0308] Suitable methods for nucleic acid delivery to effect expression of compositions are anticipated to include virtually any method by which a nucleic acid (e.g., DNA, including viral and nonviral vectors) can be introduced into a cell, a tissue or an organism, as described herein or as would be known to one of ordinary skill in the art. Such methods include, but are not limited to, direct delivery of DNA such as by injection (U.S. Pat. No. 5,994,624, 5,981,274, 5,945,100, 5,780,448, 5,736,524, 5,702,932, 5,656,610, 5,589,466 and 5,580,859, each incorporated herein by reference), including microinjection (Harland and Weintraub, 1985; U.S. Pat. No. 5,789,215, incorporated herein by reference); by electroporation (U.S. Pat. No. 5,384,253, incorporated herein by reference); by calcium phosphate precipitation (Graham and Van Der Eb, 1973; Chen and Okayama, 1987; Rippe et al., 1990); by using DEAF dextran followed by polyethylene glycol (Gopal, 1985); by direct sonic loading (Fechheimer et al., 1987); by liposome mediated transfection (Nicolau and Sene, 1982; Fraley et al., 1979; Nicolau et al., 1987; Wong et al., 1980; Kaneda et al., 1989; Kato et al., 1991); by microprojectile bombardment (PCT Application Nos. WO 94/09699 and 95/06128; U.S. Pat. Nos. 5,610,042; 5,322,783, 5,563,055, 5,550,318, 5,538,877 and 5,538,880, and each incorporated herein by reference); by agitation with silicon carbide fibers (Kaeppler et al., 1990; U.S. Pat. Nos. 5,302,523 and 5,464,765, each incorporated herein by reference); by Agrobacterium mediated transformation (U.S. Pat. Nos. 5,591,616 and 5,563,055, each incorporated herein by reference); or by PEG mediated transformation of protoplasts (Omirulleh et al., 1993; U.S. Pat. Nos. 4,684,611 and 4,952,500, each incorporated herein by reference); by desiccation/inhibition mediated DNA uptake (Potrykus et al., 1985). Other methods include viral transduction, such as gene transfer by lentiviral or retroviral transduction.

[0309] 4. Host Cells

[0310] In another aspect, contemplated are the use of host cells into which a recombinant expression vector has been introduced. Antibodies can be expressed in a variety of cell types. An expression construct encoding an antibody can be transfected into cells according to a variety of methods known in the art. Vector DNA can be introduced into prokaryotic or eukaryotic cells via conventional transformation or transfection techniques. Some vectors may employ control sequences that allow it to be replicated and/or expressed in both prokaryotic and eukaryotic cells. In certain aspects, the antibody expression construct can be placed under control of a promoter that is linked to T-cell activation, such as one that is controlled by NFAT-1 or NF-κB, both of which are transcription factors that can be activated upon T-cell activation. Control of antibody expression allows T cells, such as tumor-targeting T cells, to sense their surroundings and perform real-time modulation of cytokine signaling, both in the T cells themselves and in surrounding endogenous immune cells. One of skill in the art would understand the conditions under which to incubate host cells to maintain them and to permit replication of a vector. Also understood and known are techniques and conditions that would allow large-scale production of vectors, as well as production of the nucleic acids encoded by vectors and their cognate polypeptides, proteins, or peptides.

[0311] For stable transfection of mammalian cells, it is known, depending upon the expression vector and transfection technique used, only a small fraction of cells may integrate the foreign DNA into their genome. In order to identify and select these integrants, a selectable marker (e.g., for resistance to antibiotics) is generally introduced into the host cells along with the gene of interest. Cells stably transfected with the introduced nucleic acid can be identified by drug selection (e.g., cells that have incorporated the selectable marker gene will survive, while the other cells die), among other methods known in the arts.

[0312] B. Isolation

[0313] The nucleic acid molecule encoding either or both of the entire heavy and light chains of an antibody or the variable regions thereof may be obtained from any source that produces antibodies. Methods of isolating mRNA encoding an antibody are well known in the art. See e.g., Sambrook et al., supra. The sequences of human heavy and light chain constant region genes are also known in the art. See, e.g., Kabat et al., 1991, supra. Nucleic acid molecules encoding the full-length heavy and/or light chains may then be expressed in a cell into which they have been introduced and the antibody isolated.

### IV. Viruses

[0314] Aspects of the present disclosure relate to treatment, analysis, or use of a virus. In some embodiments, disclosed are methods for treatment or prevention of a viral infection. In some embodiments, disclosed are compositions comprising one or more anti-viral agents. In some embodiments, disclosed are methods for diagnosis of a viral infection. In some embodiments, disclosed are methods for detection of a virus in a sample.

[0315] A. Coronaviruses

[0316] In particular embodiments, the virus is from the family Coronaviridae. Coronaviridae is a family of enveloped, positive-sense, single-stranded RNA viruses. Coronavirus is the common name for Coronaviridae and Orthocoronavirinae (also referred to as Coronavirinae). The family Coronaviridae is organized in 2 sub-families, 5 genera, 23 sub-genera and approximately 40 species. They are enveloped viruses having a positive-sense single-stranded RNA genome and a nucleocapsid having helical symmetry. The genome size of coronaviruses ranges from approximately 26-32 kilobases.

[0317] The present disclosure encompasses treatment or prevention of infection of any virus in the Coronaviridae family. In certain embodiments, the disclosure encompasses treatment or prevention of infection of any virus in the subfamily Coronavirinae and including the four genera, Alpha-, Beta-, Gamma-, and Deltacoronavirus. In specific embodiments, the disclosure encompasses treatment or prevention of infection of any virus in the genus of Betacoronavirus, including the subgenus Sarbecovirus and including the species of severe acute respiratory syndrome-related coronavirus. In specific embodiments, the disclosure encompasses treatment or prevention of infection of any virus in the species of severe acute respiratory syndrome-related coronavirus, including the strains severe acute respiratory syndrome coronavirus (SARS-CoV) and severe acute respiratory syndrome coronavirus 2 (SARS-CoV-2, the virus that causes COVID-19). The disclosure encompasses treatment or prevention of infection any isolate, strain, type (including Type A, Type B and Type C; Forster et al., 2020, PNAS, available on the World Wide Web at doi.org/10.1073/pnas.2004999117), cluster, or sub-cluster of the species of severe acute respiratory syndrome-related coronavirus, including at least SARS-CoV-2. In specific embodiments, the virus has a genome length between 29000 to 30000, between 29100 and 29900, between 29200 and 29900, between 29300 and 29900, between 29400 and 29900, between 29500 and 29900, between 29600 and 29900, between 29700 and 29900, between 29800 and 29900, or between 29780 and 29900 base pairs in length.

[0318] Examples of specific SARS-CoV-2 viruses include the following listed in the NCBI GenBank® Database, and these GenBank® Accession sequences are incorporated by reference herein in their entirety: (a) LC534419 and LC534418 and LC528233 and LC529905 (examples of different strains from Japan); (b) MT281577 and MT226610 and NC_045512 and MN996531 and MN908947 (examples of different strains from China); (c) MT281530 (Iran); (d) MT126808 (Brazil); (e) MT020781 (Finland); (f) MT093571 (Sweden); (g) MT263074 (Peru); (h) MT292582 and MT292581 and MT292580 and MT292579 (examples of different strains from Spain); (i) examples from the United States, such as MT276331 (TX); MT276330 (FL); MT276328 (OR) MT276327 (GA); MT276325 (WA); MT276324 (CA); MT276323 (RI); MT188341 (MN); and (j) MT276598 (Israel). In particular embodiments, the disclosure encompasses treatment or prevention of infection of any of these or similar viruses, including viruses whose genome has at least 80, 81, 82, 83, 84, 85, 86, 87, 88, 89, 90, 91, 92, 93, 94, 95, 96, 97, 98, 99, 99.1, 99.2, 99.3, 99.4, 99.5, 99.6, 99.7, 99.8, or 99.9% identity to any of these viruses. In particular embodiments, the disclosure encompasses treatment or prevention of infection of any of these or similar viruses, including viruses whose genome has its entire sequence that is greater than 80, 81, 82, 83, 84, 85, 86, 87, 88, 89, 90, 91, 92, 93, 94, 95, 96, 97, 98, 99, 99.1, 99.2, 99.3, 99.4, 99.5, 99.6, 99.7, 99.8, or 99.9% identity to any of these viruses. As one specific example, the present disclosure includes methods of treatment or prevention of infection of a virus having a genome sequence represented by GenBank® Accession No. NC 045512; origin Wuhan, China and any virus having a genome sequence with at least 80, 81, 82, 83, 84, 85, 86, 87, 88, 89, 90, 91, 92, 93, 94, 95, 96, 97, 98, 99, 99.1, 99.2, 99.3, 99.4, 99.5, 99.6, 99.7, 99.8, or 99.9% identity to a genome sequence represented by GenBank® Accession No. NC 045512.

[0319] SARS-CoV-2 proteins are described in detail in, for example, Yoshimoto F. K. (2020) The protein journal, 39(3), 198-216, incorporated herein by reference in its entirety.

### V. Antibodies, Antigen Binding Fragments, and Polypeptides

[0320] As used herein, a “protein” or “polypeptide” refers to a molecule comprising at least five amino acid residues. As used herein, the term “wild-type” refers to the endogenous version of a molecule that occurs naturally in an organism. In some embodiments, wild-type versions of a protein or polypeptide are employed, however, in many embodiments of the disclosure, a modified protein or polypeptide is employed to generate an immune response. The terms described above may be used interchangeably. A “modified protein” or “modified polypeptide” or a “variant” refers to a protein or polypeptide whose chemical structure, particularly its amino acid sequence, is altered with respect to the wild-type protein or polypeptide. In some embodiments, a modified/variant protein or polypeptide has at least one modified activity or function (recognizing that proteins or polypeptides may have multiple activities or functions). It is specifically contemplated that a modified/variant protein or polypeptide may be altered with respect to one activity or function yet retain a wild-type activity or function in other respects, such as immunogenicity. The term polypeptide also includes and antibody fragment described herein as well as antibody domains, such as HCDR1, HCDR2, HCDR3, LCDR1, LCDR2, LCDR3, HFRW1, HFRW2, HFRW3, FIFRW4, LFRW1, LFRW2, LFRW3, LFRW4, VH, VL, CH, or CL.

[0321] Where a protein is specifically mentioned herein, it is in general a reference to a native (wild-type) or recombinant (modified) protein or, optionally, a protein in which any signal sequence has been removed. The protein may be isolated directly from the organism of which it is native, produced by recombinant DNA/exogenous expression methods, or produced by solid-phase peptide synthesis (SPPS) or other in vitro methods. In particular embodiments, there are isolated nucleic acid segments and recombinant vectors incorporating nucleic acid sequences that encode a polypeptide (e.g., an antibody or fragment thereof). The term “recombinant” may be used in conjunction with a polypeptide or the name of a specific polypeptide, and this generally refers to a polypeptide produced from a nucleic acid molecule that has been manipulated in vitro or that is a replication product of such a molecule.

[0322] In certain embodiments the size of an antibody, antigen binding fragment, protein or polypeptide (wild-type or modified) may comprise, but is not limited to, 5, 6, 7, 8, 9, 10, 11, 12, 13, 14, 15, 16, 17, 18, 19, 20, 21, 22, 23, 24, 25, 26, 27, 28, 29, 30, 31, 32, 33, 34, 35, 36, 37, 38, 39, 40, 41, 42, 43, 44, 45, 46, 47, 48, 49, 50, 51, 52, 53, 54, 55, 56, 57, 58, 59, 60, 61, 62, 63, 64, 65, 66, 67, 68, 69, 70, 71, 72, 73, 74, 75, 76, 77, 78, 79, 80, 81, 82, 83, 84, 85, 86, 87, 88, 89, 90, 91, 92, 93, 94, 95, 96, 97, 98, 99, 100, 110, 120, 130, 140, 150, 160, 170, 180, 190, 200, 210, 220, 230, 240, 250, 275, 300, 325, 350, 375, 400, 425, 450, 475, 500, 525, 550, 575, 600, 625, 650, 675, 700, 725, 750, 775, 800, 825, 850, 875, 900, 925, 950, 975, 1000, 1100, 1200, 1300, 1400, 1500, 1750, 2000, 2250, 2500 amino acid residues or greater, and any range derivable therein, or derivative of a corresponding amino sequence described or referenced herein. It is contemplated that polypeptides may be mutated by truncation, rendering them shorter than their corresponding wild-type form, also, they might be altered by fusing or conjugating a heterologous protein or polypeptide sequence with a particular function (e.g., for targeting or localization, for enhanced immunogenicity, for purification purposes, etc.). As used herein, the term “domain” refers to any distinct functional or structural unit of a protein or polypeptide, and generally refers to a sequence of amino acids with a structure or function recognizable by one skilled in the art.

[0323] The antibody, antigen binding fragment, polypeptides, proteins, or polynucleotides encoding such polypeptides or proteins of the disclosure may include 1, 2, 3, 4, 5, 6, 7, 8, 9, 11, 12, 13, 14, 15, 16, 17, 18, 19, 20, 21, 22, 23, 24, 25, 26, 27, 28, 29, 30, 31, 32, 33, 34, 36, 37, 38, 39, 40, 41, 42, 43, 44, 45, 46, 47, 48, 49, or 50 (or any derivable range therein) or more variant amino acids or nucleic acid substitutions or be at least 60%, 61%, 62%, 63%, 64%, 65%, 66%, 67%, 68%, 69%, 70%, 71%, 72%, 73%, 74%, 75%, 76%, 77%, 78%, 79%, 80%, 81%, 82%, 83%, 84%, 85%, 86%, 87%, 88%, 89%, 90%, 91%, 92%, 93%, 94%, 95%, 96%, 97%, 98%, 99%, or 100% (or any derivable range therein) similar, identical, or homologous with at least, or at most 3, 4, 5, 6, 7, 8, 9, 10, 11, 12, 13, 14, 15, 16, 17, 18, 19, 20, 21, 22, 23, 24, 25, 26, 27, 28, 29, 30, 31, 32, 33, 34, 35, 36, 37, 38, 39, 40, 41, 42, 43, 44, 45, 46, 47, 48, 49, 50, 51, 52, 53, 54, 55, 56, 57, 58, 59, 60, 61, 62, 63, 64, 65, 66, 67, 68, 69, 70, 71, 72, 73, 74, 75, 76, 77, 78, 79, 80, 81, 82, 83, 84, 85, 86, 87, 88, 89, 90, 91, 92, 93, 94, 95, 96, 97, 98, 99, 100, 101, 102, 103, 104, 105, 106, 107, 108, 109, 110, 111, 112, 113, 114, 115, 116, 117, 118, 119, 120, 121, 122, 123, 124, 125, 126, 127, 128, 129, 130, 131, 132, 133, 134, 135, 136, 137, 138, 139, 140, 141, 142, 143, 144, 145, 146, 147, 148, 149, 150, 151, 152, 153, 154, 155, 156, 157, 158, 159, 160, 161, 162, 163, 164, 165, 166, 167, 168, 169, 170, 171, 172, 173, 174, 175, 176, 177, 178, 179, 180, 181, 182, 183, 184, 185, 186, 187, 188, 189, 190, 191, 192, 193, 194, 195, 196, 197, 198, 199, 200, 201, 202, 203, 204, 205, 206, 207, 208, 209, 210, 211, 212, 213, 214, 215, 216, 217, 218, 219, 220, 221, 222, 223, 224, 225, 226, 227, 228, 229, 230, 231, 232, 233, 234, 235, 236, 237, 238, 239, 240, 241, 242, 243, 244, 245, 246, 247, 248, 249, 250, 300, 400, 500, 550, 1000 or more contiguous amino acids or nucleic acids, or any range derivable therein, of SEQ ID NO:1-2812.

[0324] In some embodiments, the antibody, antigen binding fragment, protein, or polypeptide may comprise amino acids 1 to 2, 3, 4, 5, 6, 7, 8, 9, 10, 11, 12, 13, 14, 15, 16, 17, 18, 19, 20, 21, 22, 23, 24, 25, 26, 27, 28, 29, 30, 31, 32, 33, 34, 35, 36, 37, 38, 39, 40, 41, 42, 43, 44, 45, 46, 47, 48, 49, 50, 51, 52, 53, 54, 55, 56, 57, 58, 59, 60, 61, 62, 63, 64, 65, 66, 67, 68, 69, 70, 71, 72, 73, 74, 75, 76, 77, 78, 79, 80, 81, 82, 83, 84, 85, 86, 87, 88, 89, 90, 91, 92, 93, 94, 95, 96, 97, 98, 99, 100, 101, 102, 103, 104, 105, 106, 107, 108, 109, 110, 111, 112, 113, 114, 115, 116, 117, 118, 119, 120, 121, 122, 123, 124, 125, 126, 127, 128, 129, 130, 131, 132, 133, 134, 135, 136, 137, 138, 139, 140, 141, 142, 143, 144, 145, 146, 147, 148, 149, 150, 151, 152, 153, 154, 155, 156, 157, 158, 159, 160, 161, 162, 163, 164, 165, 166, 167, 168, 169, 170, 171, 172, 173, 174, 175, 176, 177, 178, 179, 180, 181, 182, 183, 184, 185, 186, 187, 188, 189, 190, 191, 192, 193, 194, 195, 196, 197, 198, 199, 200, 201, 202, 203, 204, 205, 206, 207, 208, 209, 210, 211, 212, 213, 214, 215, 216, 217, 218, 219, 220, 221, 222, 223, 224, 225, 226, 227, 228, 229, 230, 231, 232, 233, 234, 235, 236, 237, 238, 239, 240, 241, 242, 243, 244, 245, 246, 247, 248, 249, 250, 251, 252, 253, 254, 255, 256, 257, 258, 259, 260, 261, 262, 263, 264, 265, 266, 267, 268, 269, 270, 271, 272, 273, 274, 275, 276, 277, 278, 279, 280, 281, 282, 283, 284, 285, 286, 287, 288, 289, 290, 291, 292, 293, 294, 295, 296, 297, 298, 299, 300, 301, 302, 303, 304, 305, 306, 307, 308, 309, 310, 311, 312, 313, 314, 315, 316, 317, 318, 319, 320, 321, 322, 323, 324, 325, 326, 327, 328, 329, 330, 331, 332, 333, 334, 335, 336, 337, 338, 339, 340, 341, 342, 343, 344, 345, 346, 347, 348, 349, 350, 351, 352, 353, 354, 355, 356, 357, 358, 359, 360, 361, 362, 363, 364, 365, 366, 367, 368, 369, 370, 371, 372, 373, 374, 375, 376, 377, 378, 379, 380, 381, 382, 383, 384, 385, 386, 387, 388, 389, 390, 391, 392, 393, 394, 395, 396, 397, 398, 399, 400, 401, 402, 403, 404, 405, 406, 407, 408, 409, 410, 411, 412, 413, 414, 415, 416, 417, 418, 419, 420, 421, 422, 423, 424, 425, 426, 427, 428, 429, 430, 431, 432, 433, 434, 435, 436, 437, 438, 439, 440, 441, 442, 443, 444, 445, 446, 447, 448, 449, 450, 451, 452, 453, 454, 455, 456, 457, 458, 459, 460, 461, 462, 463, 464, 465, 466, 467, 468, 469, 470, 471, 472, 473, 474, 475, 476, 477, 478, 479, 480, 481, 482, 483, 484, 485, 486, 487, 488, 489, 490, 491, 492, 493, 494, 495, 496, 497, 498, 499, 500, 501, 502, 503, 504, 505, 506, 507, 508, 509, 510, 511, 512, 513, 514, 515, 516, 517, 518, 519, 520, 521, 522, 523, 524, 525, 526, 527, 528, 529, 530, 531, 532, 533, 534, 535, 536, 537, 538, 539, 540, 541, 542, 543, 544, 545, 546, 547, 548, 549, 550, 551, 552, 553, 554, 555, 556, 557, 558, 559, 560, 561, 562, 563, 564, 565, 566, 567, 568, 569, 570, 571, 572, 573, 574, 575, 576, 577, 578, 579, 580, 581, 582, 583, 584, 585, 586, 587, 588, 589, 590, 591, 592, 593, 594, 595, 596, 597, 598, 599, 600, 601, 602, 603, 604, 605, 606, 607, 608, 609, 610, 611, 612, 613, 614, 615, 616, 617, 618, 619, 620, 621, 622, 623, 624, 625, 626, 627, 628, 629, 630, 631, 632, 633, 634, 635, 636, 637, 638, 639, 640, 641, 642, 643, 644, 645, 646, 647, 648, 649, 650, 651, 652, 653, 654, 655, 656, 657, 658, 659, 660, 661, 662, 663, 664, 665, 666, 667, 668, 669, 670, 671, 672, 673, 674, 675, 676, 677, 678, 679, 680, 681, 682, 683, 684, 685, 686, 687, 688, 689, 690, 691, 692, 693, 694, 695, 696, 697, 698, 699, 700, 701, 702, 703, 704, 705, 706, 707, 708, 709, 710, 711, 712, 713, 714, 715, 716, 717, 718, 719, 720, 721, 722, 723, 724, 725, 726, 727, 728, 729, 730, 731, 732, 733, 734, 735, 736, 737, 738, 739, 740, 741, 742, 743, 744, 745, 746, 747, 748, 749, 750, 751, 752, 753, 754, 755, 756, 757, 758, 759, 760, 761, 762, 763, 764, 765, 766, 767, 768, 769, 770, 771, 772, 773, 774, 775, 776, 777, 778, 779, 780, 781, 782, 783, 784, 785, 786, 787, 788, 789, 790, 791, 792, 793, 794, 795, 796, 797, 798, 799, 800, 801, 802, 803, 804, 805, 806, 807, 808, 809, 810, 811, 812, 813, 814, 815, 816, 817, 818, 819, 820, 821, 822, 823, 824, 825, 826, 827, 828, 829, 830, 831, 832, 833, 834, 835, 836, 837, 838, 839, 840, 841, 842, 843, 844, 845, 846, 847, 848, 849, 850, 851, 852, 853, 854, 855, 856, 857, 858, 859, 860, 861, 862, 863, 864, 865, 866, 867, 868, 869, 870, 871, 872, 873, 874, 875, 876, 877, 878, 879, 880, 881, 882, 883, 884, 885, 886, 887, 888, 889, 890, 891, 892, 893, 894, 895, 896, 897, 898, 899, 900, 901, 902, 903, 904, 905, 906, 907, 908, 909, 910, 911, 912, 913, 914, 915, 916, 917, 918, 919, 920, 921, 922, 923, 924, 925, 926, 927, 928, 929, 930, 931, 932, 933, 934, 935, 936, 937, 938, 939, 940, 941, 942, 943, 944, 945, 946, 947, 948, 949, 950, 951, 952, 953, 954, 955, 956, 957, 958, 959, 960, 961, 962, 963, 964, 965, 966, 967, 968, 969, 970, 971, 972, 973, 974, 975, 976, 977, 978, 979, 980, 981, 982, 983, 984, 985, 986, 987, 988, 989, 990, 991, 992, 993, 994, 995, 996, 997, 998, 999, or 1000, (or any derivable range therein) of SEQ ID NOS:1-2812.

[0325] In some embodiments, the antibody, antigen binding fragment, or polypeptide may comprise 1, 2, 3, 4, 5, 6, 7, 8, 9, 10, 11, 12, 13, 14, 15, 16, 17, 18, 19, 20, 21, 22, 23, 24, 25, 26, 27, 28, 29, 30, 31, 32, 33, 34, 35, 36, 37, 38, 39, 40, 41, 42, 43, 44, 45, 46, 47, 48, 49, 50, 51, 52, 53, 54, 55, 56, 57, 58, 59, 60, 61, 62, 63, 64, 65, 66, 67, 68, 69, 70, 71, 72, 73, 74, 75, 76, 77, 78, 79, 80, 81, 82, 83, 84, 85, 86, 87, 88, 89, 90, 91, 92, 93, 94, 95, 96, 97, 98, 99, 100, 101, 102, 103, 104, 105, 106, 107, 108, 109, 110, 111, 112, 113, 114, 115, 116, 117, 118, 119, 120, 121, 122, 123, 124, 125, 126, 127, 128, 129, 130, 131, 132, 133, 134, 135, 136, 137, 138, 139, 140, 141, 142, 143, 144, 145, 146, 147, 148, 149, 150, 151, 152, 153, 154, 155, 156, 157, 158, 159, 160, 161, 162, 163, 164, 165, 166, 167, 168, 169, 170, 171, 172, 173, 174, 175, 176, 177, 178, 179, 180, 181, 182, 183, 184, 185, 186, 187, 188, 189, 190, 191, 192, 193, 194, 195, 196, 197, 198, 199, 200, 201, 202, 203, 204, 205, 206, 207, 208, 209, 210, 211, 212, 213, 214, 215, 216, 217, 218, 219, 220, 221, 222, 223, 224, 225, 226, 227, 228, 229, 230, 231, 232, 233, 234, 235, 236, 237, 238, 239, 240, 241, 242, 243, 244, 245, 246, 247, 248, 249, 250, 251, 252, 253, 254, 255, 256, 257, 258, 259, 260, 261, 262, 263, 264, 265, 266, 267, 268, 269, 270, 271, 272, 273, 274, 275, 276, 277, 278, 279, 280, 281, 282, 283, 284, 285, 286, 287, 288, 289, 290, 291, 292, 293, 294, 295, 296, 297, 298, 299, 300, 301, 302, 303, 304, 305, 306, 307, 308, 309, 310, 311, 312, 313, 314, 315, 316, 317, 318, 319, 320, 321, 322, 323, 324, 325, 326, 327, 328, 329, 330, 331, 332, 333, 334, 335, 336, 337, 338, 339, 340, 341, 342, 343, 344, 345, 346, 347, 348, 349, 350, 351, 352, 353, 354, 355, 356, 357, 358, 359, 360, 361, 362, 363, 364, 365, 366, 367, 368, 369, 370, 371, 372, 373, 374, 375, 376, 377, 378, 379, 380, 381, 382, 383, 384, 385, 386, 387, 388, 389, 390, 391, 392, 393, 394, 395, 396, 397, 398, 399, 400, 401, 402, 403, 404, 405, 406, 407, 408, 409, 410, 411, 412, 413, 414, 415, 416, 417, 418, 419, 420, 421, 422, 423, 424, 425, 426, 427, 428, 429, 430, 431, 432, 433, 434, 435, 436, 437, 438, 439, 440, 441, 442, 443, 444, 445, 446, 447, 448, 449, 450, 451, 452, 453, 454, 455, 456, 457, 458, 459, 460, 461, 462, 463, 464, 465, 466, 467, 468, 469, 470, 471, 472, 473, 474, 475, 476, 477, 478, 479, 480, 481, 482, 483, 484, 485, 486, 487, 488, 489, 490, 491, 492, 493, 494, 495, 496, 497, 498, 499, 500, 501, 502, 503, 504, 505, 506, 507, 508, 509, 510, 511, 512, 513, 514, 515, 516, 517, 518, 519, 520, 521, 522, 523, 524, 525, 526, 527, 528, 529, 530, 531, 532, 533, 534, 535, 536, 537, 538, 539, 540, 541, 542, 543, 544, 545, 546, 547, 548, 549, 550, 551, 552, 553, 554, 555, 556, 557, 558, 559, 560, 561, 562, 563, 564, 565, 566, 567, 568, 569, 570, 571, 572, 573, 574, 575, 576, 577, 578, 579, 580, 581, 582, 583, 584, 585, 586, 587, 588, 589, 590, 591, 592, 593, 594, 595, 596, 597, 598, 599, 600, 601, 602, 603, 604, 605, 606, 607, 608, 609, 610, 611, 612, 613, 614, 615, 616, 617, 618, 619, 620, 621, 622, 623, 624, 625, 626, 627, 628, 629, 630, 631, 632, 633, 634, 635, 636, 637, 638, 639, 640, 641, 642, 643, 644, 645, 646, 647, 648, 649, 650, 651, 652, 653, 654, 655, 656, 657, 658, 659, 660, 661, 662, 663, 664, 665, 666, 667, 668, 669, 670, 671, 672, 673, 674, 675, 676, 677, 678, 679, 680, 681, 682, 683, 684, 685, 686, 687, 688, 689, 690, 691, 692, 693, 694, 695, 696, 697, 698, 699, 700, 701, 702, 703, 704, 705, 706, 707, 708, 709, 710, 711, 712, 713, 714, 715, 716, 717, 718, 719, 720, 721, 722, 723, 724, 725, 726, 727, 728, 729, 730, 731, 732, 733, 734, 735, 736, 737, 738, 739, 740, 741, 742, 743, 744, 745, 746, 747, 748, 749, 750, 751, 752, 753, 754, 755, 756, 757, 758, 759, 760, 761, 762, 763, 764, 765, 766, 767, 768, 769, 770, 771, 772, 773, 774, 775, 776, 777, 778, 779, 780, 781, 782, 783, 784, 785, 786, 787, 788, 789, 790, 791, 792, 793, 794, 795, 796, 797, 798, 799, 800, 801, 802, 803, 804, 805, 806, 807, 808, 809, 810, 811, 812, 813, 814, 815, 816, 817, 818, 819, 820, 821, 822, 823, 824, 825, 826, 827, 828, 829, 830, 831, 832, 833, 834, 835, 836, 837, 838, 839, 840, 841, 842, 843, 844, 845, 846, 847, 848, 849, 850, 851, 852, 853, 854, 855, 856, 857, 858, 859, 860, 861, 862, 863, 864, 865, 866, 867, 868, 869, 870, 871, 872, 873, 874, 875, 876, 877, 878, 879, 880, 881, 882, 883, 884, 885, 886, 887, 888, 889, 890, 891, 892, 893, 894, 895, 896, 897, 898, 899, 900, 901, 902, 903, 904, 905, 906, 907, 908, 909, 910, 911, 912, 913, 914, 915, 916, 917, 918, 919, 920, 921, 922, 923, 924, 925, 926, 927, 928, 929, 930, 931, 932, 933, 934, 935, 936, 937, 938, 939, 940, 941, 942, 943, 944, 945, 946, 947, 948, 949, 950, 951, 952, 953, 954, 955, 956, 957, 958, 959, 960, 961, 962, 963, 964, 965, 966, 967, 968, 969, 970, 971, 972, 973, 974, 975, 976, 977, 978, 979, 980, 981, 982, 983, 984, 985, 986, 987, 988, 989, 990, 991, 992, 993, 994, 995, 996, 997, 998, 999, or 1000, (or any derivable range therein) contiguous amino acids or nucleic acids of SEQ ID NOs:1-2812.

[0326] In some embodiments, the antibody, antigen binding fragment, protein, or polypeptide may comprise at least, at most, or exactly 1, 2, 3, 4, 5, 6, 7, 8, 9, 10, 11, 12, 13, 14, 16, 17, 18, 19, 20, 21, 22, 23, 24, 25, 26, 27, 28, 29, 30, 31, 32, 33, 34, 35, 36, 37, 38, 39, 41, 42, 43, 44, 45, 46, 47, 48, 49, 50, 51, 52, 53, 54, 55, 56, 57, 58, 59, 60, 61, 62, 63, 64, 66, 67, 68, 69, 70, 71, 72, 73, 74, 75, 76, 77, 78, 79, 80, 81, 82, 83, 84, 85, 86, 87, 88, 89, 91, 92, 93, 94, 95, 96, 97, 98, 99, 100, 101, 102, 103, 104, 105, 106, 107, 108, 109, 110, 111, 112, 113, 114, 115, 116, 117, 118, 119, 120, 121, 122, 123, 124, 125, 126, 127, 128, 129, 130, 131, 132, 133, 134, 135, 136, 137, 138, 139, 140, 141, 142, 143, 144, 145, 146, 147, 148, 149, 150, 151, 152, 153, 154, 155, 156, 157, 158, 159, 160, 161, 162, 163, 164, 165, 166, 167, 168, 169, 170, 171, 172, 173, 174, 175, 176, 177, 178, 179, 180, 181, 182, 183, 184, 185, 186, 187, 188, 189, 190, 191, 192, 193, 194, 195, 196, 197, 198, 199, 200, 201, 202, 203, 204, 205, 206, 207, 208, 209, 210, 211, 212, 213, 214, 215, 216, 217, 218, 219, 220, 221, 222, 223, 224, 225, 226, 227, 228, 229, 230, 231, 232, 233, 234, 235, 236, 237, 238, 239, 240, 241, 242, 243, 244, 245, 246, 247, 248, 249, 250, 251, 252, 253, 254, 255, 256, 257, 258, 259, 260, 261, 262, 263, 264, 265, 266, 267, 268, 269, 270, 271, 272, 273, 274, 275, 276, 277, 278, 279, 280, 281, 282, 283, 284, 285, 286, 287, 288, 289, 290, 291, 292, 293, 294, 295, 296, 297, 298, 299, 300, 301, 302, 303, 304, 305, 306, 307, 308, 309, 310, 311, 312, 313, 314, 315, 316, 317, 318, 319, 320, 321, 322, 323, 324, 325, 326, 327, 328, 329, 330, 331, 332, 333, 334, 335, 336, 337, 338, 339, 340, 341, 342, 343, 344, 345, 346, 347, 348, 349, 350, 351, 352, 353, 354, 355, 356, 357, 358, 359, 360, 361, 362, 363, 364, 365, 366, 367, 368, 369, 370, 371, 372, 373, 374, 375, 376, 377, 378, 379, 380, 381, 382, 383, 384, 385, 386, 387, 388, 389, 390, 391, 392, 393, 394, 395, 396, 397, 398, 399, 400, 401, 402, 403, 404, 405, 406, 407, 408, 409, 410, 411, 412, 413, 414, 415, 416, 417, 418, 419, 420, 421, 422, 423, 424, 425, 426, 427, 428, 429, 430, 431, 432, 433, 434, 435, 436, 437, 438, 439, 440, 441, 442, 443, 444, 445, 446, 447, 448, 449, 450, 451, 452, 453, 454, 455, 456, 457, 458, 459, 460, 461, 462, 463, 464, 465, 466, 467, 468, 469, 470, 471, 472, 473, 474, 475, 476, 477, 478, 479, 480, 481, 482, 483, 484, 485, 486, 487, 488, 489, 490, 491, 492, 493, 494, 495, 496, 497, 498, 499, 500, 501, 502, 503, 504, 505, 506, 507, 508, 509, 510, 511, 512, 513, 514, 515, 516, 517, 518, 519, 520, 521, 522, 523, 524, 525, 526, 527, 528, 529, 530, 531, 532, 533, 534, 535, 536, 537, 538, 539, 540, 541, 542, 543, 544, 545, 546, 547, 548, 549, 550, 551, 552, 553, 554, 555, 556, 557, 558, 559, 560, 561, 562, 563, 564, 565, 566, 567, 568, 569, 570, 571, 572, 573, 574, 575, 576, 577, 578, 579, 580, 581, 582, 583, 584, 585, 586, 587, 588, 589, 590, 591, 592, 593, 594, 595, 596, 597, 598, 599, 600, 601, 602, 603, 604, 605, 606, 607, 608, 609, 610, 611, 612, 613, 614, 615, 616, 617, 618, 619, 620, 621, 622, 623, 624, 625, 626, 627, 628, 629, 630, 631, 632, 633, 634, 635, 636, 637, 638, 639, 640, 641, 642, 643, 644, 645, 646, 647, 648, 649, 650, 651, 652, 653, 654, 655, 656, 657, 658, 659, 660, 661, 662, 663, 664, 665, 666, 667, 668, 669, 670, 671, 672, 673, 674, 675, 676, 677, 678, 679, 680, 681, 682, 683, 684, 685, 686, 687, 688, 689, 690, 691, 692, 693, 694, 695, 696, 697, 698, 699, 700, 701, 702, 703, 704, 705, 706, 707, 708, 709, 710, 711, 712, 713, 714, 715, 716, 717, 718, 719, 720, 721, 722, 723, 724, 725, 726, 727, 728, 729, 730, 731, 732, 733, 734, 735, 736, 737, 738, 739, 740, 741, 742, 743, 744, 745, 746, 747, 748, 749, 750, 751, 752, 753, 754, 755, 756, 757, 758, 759, 760, 761, 762, 763, 764, 765, 766, 767, 768, 769, 770, 771, 772, 773, 774, 775, 776, 777, 778, 779, 780, 781, 782, 783, 784, 785, 786, 787, 788, 789, 790, 791, 792, 793, 794, 795, 796, 797, 798, 799, 800, 801, 802, 803, 804, 805, 806, 807, 808, 809, 810, 811, 812, 813, 814, 815, 816, 817, 818, 819, 820, 821, 822, 823, 824, 825, 826, 827, 828, 829, 830, 831, 832, 833, 834, 835, 836, 837, 838, 839, 840, 841, 842, 843, 844, 845, 846, 847, 848, 849, 850, 851, 852, 853, 854, 855, 856, 857, 858, 859, 860, 861, 862, 863, 864, 865, 866, 867, 868, 869, 870, 871, 872, 873, 874, 875, 876, 877, 878, 879, 880, 881, 882, 883, 884, 885, 886, 887, 888, 889, 890, 891, 892, 893, 894, 895, 896, 897, 898, 899, 900, 901, 902, 903, 904, 905, 906, 907, 908, 909, 910, 911, 912, 913, 914, 915, 916, 917, 918, 919, 920, 921, 922, 923, 924, 925, 926, 927, 928, 929, 930, 931, 932, 933, 934, 935, 936, 937, 938, 939, 940, 941, 942, 943, 944, 945, 946, 947, 948, 949, 950, 951, 952, 953, 954, 955, 956, 957, 958, 959, 960, 961, 962, 963, 964, 965, 966, 967, 968, 969, 970, 971, 972, 973, 974, 975, 976, 977, 978, 979, 980, 981, 982, 983, 984, 985, 986, 987, 988, 989, 990, 991, 992, 993, 994, 995, 996, 997, 998, 999, or 1000 (or any derivable range therein) contiguous amino acids or nucleic acids of SEQ ID NOS:1-2812 that are at least, at most, or exactly 60%, 61%, 62%, 63%, 64%, 65%, 66%, 67%, 68%, 69%, 70%, 71%, 72%, 73%, 74%, 75%, 76%, 77%, 78%, 79%, 80%, 81%, 82%, 83%, 84%, 85%, 86%, 87%, 88%, 89%, 90%, 91%, 92%, 93%, 94%, 95%, 96%, 97%, 98%, 99%, or 100% (or any derivable range therein) similar, identical, or homologous with one of SEQ ID NOS:1-2812.

[0327] In some aspects there is a nucleic acid molecule, antibody, antigen binding fragment, protein, or polypeptide starting at position 1, 2, 3, 4, 5, 6, 7, 8, 9, 10, 11, 12, 13, 14, 16, 17, 18, 19, 20, 21, 22, 23, 24, 25, 26, 27, 28, 29, 30, 31, 32, 33, 34, 35, 36, 37, 38, 39, 41, 42, 43, 44, 45, 46, 47, 48, 49, 50, 51, 52, 53, 54, 55, 56, 57, 58, 59, 60, 61, 62, 63, 64, 66, 67, 68, 69, 70, 71, 72, 73, 74, 75, 76, 77, 78, 79, 80, 81, 82, 83, 84, 85, 86, 87, 88, 89, 91, 92, 93, 94, 95, 96, 97, 98, 99, 100, 101, 102, 103, 104, 105, 106, 107, 108, 109, 110, 111, 112, 113, 114, 115, 116, 117, 118, 119, 120, 121, 122, 123, 124, 125, 126, 127, 128, 129, 130, 131, 132, 133, 134, 135, 136, 137, 138, 139, 140, 141, 142, 143, 144, 145, 146, 147, 148, 149, 150, 151, 152, 153, 154, 155, 156, 157, 158, 159, 160, 161, 162, 163, 164, 165, 166, 167, 168, 169, 170, 171, 172, 173, 174, 175, 176, 177, 178, 179, 180, 181, 182, 183, 184, 185, 186, 187, 188, 189, 190, 191, 192, 193, 194, 195, 196, 197, 198, 199, 200, 201, 202, 203, 204, 205, 206, 207, 208, 209, 210, 211, 212, 213, 214, 215, 216, 217, 218, 219, 220, 221, 222, 223, 224, 225, 226, 227, 228, 229, 230, 231, 232, 233, 234, 235, 236, 237, 238, 239, 240, 241, 242, 243, 244, 245, 246, 247, 248, 249, 250, 251, 252, 253, 254, 255, 256, 257, 258, 259, 260, 261, 262, 263, 264, 265, 266, 267, 268, 269, 270, 271, 272, 273, 274, 275, 276, 277, 278, 279, 280, 281, 282, 283, 284, 285, 286, 287, 288, 289, 290, 291, 292, 293, 294, 295, 296, 297, 298, 299, 300, 301, 302, 303, 304, 305, 306, 307, 308, 309, 310, 311, 312, 313, 314, 315, 316, 317, 318, 319, 320, 321, 322, 323, 324, 325, 326, 327, 328, 329, 330, 331, 332, 333, 334, 335, 336, 337, 338, 339, 340, 341, 342, 343, 344, 345, 346, 347, 348, 349, 350, 351, 352, 353, 354, 355, 356, 357, 358, 359, 360, 361, 362, 363, 364, 365, 366, 367, 368, 369, 370, 371, 372, 373, 374, 375, 376, 377, 378, 379, 380, 381, 382, 383, 384, 385, 386, 387, 388, 389, 390, 391, 392, 393, 394, 395, 396, 397, 398, 399, 400, 401, 402, 403, 404, 405, 406, 407, 408, 409, 410, 411, 412, 413, 414, 415, 416, 417, 418, 419, 420, 421, 422, 423, 424, 425, 426, 427, 428, 429, 430, 431, 432, 433, 434, 435, 436, 437, 438, 439, 440, 441, 442, 443, 444, 445, 446, 447, 448, 449, 450, 451, 452, 453, 454, 455, 456, 457, 458, 459, 460, 461, 462, 463, 464, 465, 466, 467, 468, 469, 470, 471, 472, 473, 474, 475, 476, 477, 478, 479, 480, 481, 482, 483, 484, 485, 486, 487, 488, 489, 490, 491, 492, 493, 494, 495, 496, 497, 498, 499, 500, 501, 502, 503, 504, 505, 506, 507, 508, 509, 510, 511, 512, 513, 514, 515, 516, 517, 518, 519, 520, 521, 522, 523, 524, 525, 526, 527, 528, 529, 530, 531, 532, 533, 534, 535, 536, 537, 538, 539, 540, 541, 542, 543, 544, 545, 546, 547, 548, 549, 550, 551, 552, 553, 554, 555, 556, 557, 558, 559, 560, 561, 562, 563, 564, 565, 566, 567, 568, 569, 570, 571, 572, 573, 574, 575, 576, 577, 578, 579, 580, 581, 582, 583, 584, 585, 586, 587, 588, 589, 590, 591, 592, 593, 594, 595, 596, 597, 598, 599, 600, 601, 602, 603, 604, 605, 606, 607, 608, 609, 610, 611, 612, 613, 614, 615, 616, 617, 618, 619, 620, 621, 622, 623, 624, 625, 626, 627, 628, 629, 630, 631, 632, 633, 634, 635, 636, 637, 638, 639, 640, 641, 642, 643, 644, 645, 646, 647, 648, 649, 650, 651, 652, 653, 654, 655, 656, 657, 658, 659, 660, 661, 662, 663, 664, 665, 666, 667, 668, 669, 670, 671, 672, 673, 674, 675, 676, 677, 678, 679, 680, 681, 682, 683, 684, 685, 686, 687, 688, 689, 690, 691, 692, 693, 694, 695, 696, 697, 698, 699, 700, 701, 702, 703, 704, 705, 706, 707, 708, 709, 710, 711, 712, 713, 714, 715, 716, 717, 718, 719, 720, 721, 722, 723, 724, 725, 726, 727, 728, 729, 730, 731, 732, 733, 734, 735, 736, 737, 738, 739, 740, 741, 742, 743, 744, 745, 746, 747, 748, 749, 750, 751, 752, 753, 754, 755, 756, 757, 758, 759, 760, 761, 762, 763, 764, 765, 766, 767, 768, 769, 770, 771, 772, 773, 774, 775, 776, 777, 778, 779, 780, 781, 782, 783, 784, 785, 786, 787, 788, 789, 790, 791, 792, 793, 794, 795, 796, 797, 798, 799, 800, 801, 802, 803, 804, 805, 806, 807, 808, 809, 810, 811, 812, 813, 814, 815, 816, 817, 818, 819, 820, 821, 822, 823, 824, 825, 826, 827, 828, 829, 830, 831, 832, 833, 834, 835, 836, 837, 838, 839, 840, 841, 842, 843, 844, 845, 846, 847, 848, 849, 850, 851, 852, 853, 854, 855, 856, 857, 858, 859, 860, 861, 862, 863, 864, 865, 866, 867, 868, 869, 870, 871, 872, 873, 874, 875, 876, 877, 878, 879, 880, 881, 882, 883, 884, 885, 886, 887, 888, 889, 890, 891, 892, 893, 894, 895, 896, 897, 898, 899, 900, 901, 902, 903, 904, 905, 906, 907, 908, 909, 910, 911, 912, 913, 914, 915, 916, 917, 918, 919, 920, 921, 922, 923, 924, 925, 926, 927, 928, 929, 930, 931, 932, 933, 934, 935, 936, 937, 938, 939, 940, 941, 942, 943, 944, 945, 946, 947, 948, 949, 950, 951, 952, 953, 954, 955, 956, 957, 958, 959, 960, 961, 962, 963, 964, 965, 966, 967, 968, 969, 970, 971, 972, 973, 974, 975, 976, 977, 978, 979, 980, 981, 982, 983, 984, 985, 986, 987, 988, 989, 990, 991, 992, 993, 994, 995, 996, 997, 998, 999, or 1000 of any of SEQ ID NOS:1-2812 and comprising at least, at most, or exactly 2, 3, 4, 5, 6, 7, 8, 9, 10, 11, 12, 13, 14, 15, 16, 17, 18, 19, 20, 21, 22, 23, 24, 25, 26, 27, 28, 29, 30, 31, 32, 33, 34, 35, 36, 37, 38, 39, 40, 41, 42, 43, 44, 45, 46, 47, 48, 49, 50, 51, 52, 53, 54, 55, 56, 57, 58, 59, 60, 61, 62, 63, 64, 65, 66, 67, 68, 69, 70, 71, 72, 73, 74, 75, 76, 77, 78, 79, 80, 81, 82, 83, 84, 85, 86, 87, 88, 89, 90, 91, 92, 93, 94, 95, 96, 97, 98, 99, 100, 101, 102, 103, 104, 105, 106, 107, 108, 109, 110, 111, 112, 113, 114, 115, 116, 117, 118, 119, 120, 121, 122, 123, 124, 125, 126, 127, 128, 129, 130, 131, 132, 133, 134, 135, 136, 137, 138, 139, 140, 141, 142, 143, 144, 145, 146, 147, 148, 149, 150, 151, 152, 153, 154, 155, 156, 157, 158, 159, 160, 161, 162, 163, 164, 165, 166, 167, 168, 169, 170, 171, 172, 173, 174, 175, 176, 177, 178, 179, 180, 181, 182, 183, 184, 185, 186, 187, 188, 189, 190, 191, 192, 193, 194, 195, 196, 197, 198, 199, 200, 201, 202, 203, 204, 205, 206, 207, 208, 209, 210, 211, 212, 213, 214, 215, 216, 217, 218, 219, 220, 221, 222, 223, 224, 225, 226, 227, 228, 229, 230, 231, 232, 233, 234, 235, 236, 237, 238, 239, 240, 241, 242, 243, 244, 245, 246, 247, 248, 249, 250, 251, 252, 253, 254, 255, 256, 257, 258, 259, 260, 261, 262, 263, 264, 265, 266, 267, 268, 269, 270, 271, 272, 273, 274, 275, 276, 277, 278, 279, 280, 281, 282, 283, 284, 285, 286, 287, 288, 289, 290, 291, 292, 293, 294, 295, 296, 297, 298, 299, 300, 301, 302, 303, 304, 305, 306, 307, 308, 309, 310, 311, 312, 313, 314, 315, 316, 317, 318, 319, 320, 321, 322, 323, 324, 325, 326, 327, 328, 329, 330, 331, 332, 333, 334, 335, 336, 337, 338, 339, 340, 341, 342, 343, 344, 345, 346, 347, 348, 349, 350, 351, 352, 353, 354, 355, 356, 357, 358, 359, 360, 361, 362, 363, 364, 365, 366, 367, 368, 369, 370, 371, 372, 373, 374, 375, 376, 377, 378, 379, 380, 381, 382, 383, 384, 385, 386, 387, 388, 389, 390, 391, 392, 393, 394, 395, 396, 397, 398, 399, 400, 401, 402, 403, 404, 405, 406, 407, 408, 409, 410, 411, 412, 413, 414, 415, 416, 417, 418, 419, 420, 421, 422, 423, 424, 425, 426, 427, 428, 429, 430, 431, 432, 433, 434, 435, 436, 437, 438, 439, 440, 441, 442, 443, 444, 445, 446, 447, 448, 449, 450, 451, 452, 453, 454, 455, 456, 457, 458, 459, 460, 461, 462, 463, 464, 465, 466, 467, 468, 469, 470, 471, 472, 473, 474, 475, 476, 477, 478, 479, 480, 481, 482, 483, 484, 485, 486, 487, 488, 489, 490, 491, 492, 493, 494, 495, 496, 497, 498, 499, 500, 501, 502, 503, 504, 505, 506, 507, 508, 509, 510, 511, 512, 513, 514, 515, 516, 517, 518, 519, 520, 521, 522, 523, 524, 525, 526, 527, 528, 529, 530, 531, 532, 533, 534, 535, 536, 537, 538, 539, 540, 541, 542, 543, 544, 545, 546, 547, 548, 549, 550, 551, 552, 553, 554, 555, 556, 557, 558, 559, 560, 561, 562, 563, 564, 565, 566, 567, 568, 569, 570, 571, 572, 573, 574, 575, 576, 577, 578, 579, 580, 581, 582, 583, 584, 585, 586, 587, 588, 589, 590, 591, 592, 593, 594, 595, 596, 597, 598, 599, 600, 601, 602, 603, 604, 605, 606, 607, 608, 609, 610, 611, 612, 613, 614, 615, 616, 617, 618, 619, 620, 621, 622, 623, 624, 625, 626, 627, 628, 629, 630, 631, 632, 633, 634, 635, 636, 637, 638, 639, 640, 641, 642, 643, 644, 645, 646, 647, 648, 649, 650, 651, 652, 653, 654, 655, 656, 657, 658, 659, 660, 661, 662, 663, 664, 665, 666, 667, 668, 669, 670, 671, 672, 673, 674, 675, 676, 677, 678, 679, 680, 681, 682, 683, 684, 685, 686, 687, 688, 689, 690, 691, 692, 693, 694, 695, 696, 697, 698, 699, 700, 701, 702, 703, 704, 705, 706, 707, 708, 709, 710, 711, 712, 713, 714, 715, 716, 717, 718, 719, 720, 721, 722, 723, 724, 725, 726, 727, 728, 729, 730, 731, 732, 733, 734, 735, 736, 737, 738, 739, 740, 741, 742, 743, 744, 745, 746, 747, 748, 749, 750, 751, 752, 753, 754, 755, 756, 757, 758, 759, 760, 761, 762, 763, 764, 765, 766, 767, 768, 769, 770, 771, 772, 773, 774, 775, 776, 777, 778, 779, 780, 781, 782, 783, 784, 785, 786, 787, 788, 789, 790, 791, 792, 793, 794, 795, 796, 797, 798, 799, 800, 801, 802, 803, 804, 805, 806, 807, 808, 809, 810, 811, 812, 813, 814, 815, 816, 817, 818, 819, 820, 821, 822, 823, 824, 825, 826, 827, 828, 829, 830, 831, 832, 833, 834, 835, 836, 837, 838, 839, 840, 841, 842, 843, 844, 845, 846, 847, 848, 849, 850, 851, 852, 853, 854, 855, 856, 857, 858, 859, 860, 861, 862, 863, 864, 865, 866, 867, 868, 869, 870, 871, 872, 873, 874, 875, 876, 877, 878, 879, 880, 881, 882, 883, 884, 885, 886, 887, 888, 889, 890, 891, 892, 893, 894, 895, 896, 897, 898, 899, 900, 901, 902, 903, 904, 905, 906, 907, 908, 909, 910, 911, 912, 913, 914, 915, 916, 917, 918, 919, 920, 921, 922, 923, 924, 925, 926, 927, 928, 929, 930, 931, 932, 933, 934, 935, 936, 937, 938, 939, 940, 941, 942, 943, 944, 945, 946, 947, 948, 949, 950, 951, 952, 953, 954, 955, 956, 957, 958, 959, 960, 961, 962, 963, 964, 965, 966, 967, 968, 969, 970, 971, 972, 973, 974, 975, 976, 977, 978, 979, 980, 981, 982, 983, 984, 985, 986, 987, 988, 989, 990, 991, 992, 993, 994, 995, 996, 997, 998, 999, or 1000 (or any derivable range therein) contiguous amino acids or nucleotides of any of SEQ ID NOS:1-2812.

[0328] In some embodiments, the amino acid at position 1, 2, 3, 4, 5, 6, 7, 8, 9, 10, 11, 12, 13, 14, 15, 16, 17, 18, 19, 20, 21, 22, 23, 24, 25, 26, 27, 28, 29, 30, 31, 32, 33, 34, 35, 36, 37, 38, 39, 40, 41, 42, 43, 44, 45, 46, 47, 48, 49, 50, 51, 52, 53, 54, 55, 56, 57, 58, 59, 60, 61, 62, 63, 64, 65, 66, 67, 68, 69, 70, 71, 72, 73, 74, 75, 76, 77, 78, 79, 80, 81, 82, 83, 84, 85, 86, 87, 88, 89, 90, 91, 92, 93, 94, 95, 96, 97, 98, 99, 100, 101, 102, 103, 104, 105, 106, 107, 108, 109, 110, 111, 112, 113, 114, 115, 116, 117, 118, 119, 120, 121, 122, 123, 124, 125, 126, 127, 128, 129, 130, 131, 132, 133, 134, 135, 136, 137, 138, 139, 140, 141, 142, 143, 144, 145, 146, 147, 148, 149, 150, 151, 152, 153, 154, 155, 156, 157, 158, 159, 160, 161, 162, 163, 164, 165, 166, 167, 168, 169, 170, 171, 172, 173, 174, 175, 176, 177, 178, 179, 180, 181, 182, 183, 184, 185, 186, 187, 188, 189, 190, 191, 192, 193, 194, 195, 196, 197, 198, 199, 200, 201, 202, 203, 204, 205, 206, 207, 208, 209, 210, 211, 212, 213, 214, 215, 216, 217, 218, 219, 220, 221, 222, 223, 224, 225, 226, 227, 228, 229, 230, 231, 232, 233, 234, 235, 236, 237, 238, 239, 240, 241, 242, 243, 244, 245, 246, 247, 248, 249, 250, 251, 252, 253, 254, 255, 256, 257, 258, 259, 260, 261, 262, 263, 264, 265, 266, 267, 268, 269, 270, 271, 272, 273, 274, 275, 276, 277, 278, 279, 280, 281, 282, 283, 284, 285, 286, 287, 288, 289, 290, 291, 292, 293, 294, 295, 296, 297, 298, 299, 300, 301, 302, 303, 304, 305, 306, 307, 308, 309, 310, 311, 312, 313, 314, 315, 316, 317, 318, 319, 320, 321, 322, 323, 324, 325, 326, 327, 328, 329, 330, 331, 332, 333, 334, 335, 336, 337, 338, 339, 340, 341, 342, 343, 344, 345, 346, 347, 348, 349, 350, 351, 352, 353, 354, 355, 356, 357, 358, 359, 360, 361, 362, 363, 364, 365, 366, 367, 368, 369, 370, 371, 372, 373, 374, 375, 376, 377, 378, 379, 380, 381, 382, 383, 384, 385, 386, 387, 388, 389, 390, 391, 392, 393, 394, 395, 396, 397, 398, 399, or 400 of the heavy chain, light chain, VH, VL, HCDR1, HCDR2, HCDR3, LCDR1, LCDR2, LCDR3, HFRW1, HFRW2, HFRW3, HFRW4, LFRW1, LFRW2, LFRW3, or LFRW4 identified in Table 1 and SEQ ID NOS:1-1620 or 1825-2706 is substituted with an alanine, arginine, asparagine, aspartic acid, cysteine, glutamine, glutamic acid, glycine, histidine, isoleucine, leucine, lysine, methionine, phenylalanine, proline, serine, threonine, tryptophan, tyrosine, or valine.

[0329] In some embodiments, a polypeptide (e.g., antibody, antibody fragment, Fab, etc.) of the disclosure comprises a CDR that is at least 65, 66, 67, 68, 69, 70, 71, 72, 73, 74, 75, 76, 77, 78, 79, 80, 81, 82, 83, 84, 85, 86, 87, 88, 89, 90, 91, 92, 93, 94, 95, 96, 97, 98, 99, or 100% identical (or any range derivable therein) in sequence to one of SEQ ID NOS:1-2804. In some embodiments, a polypeptide comprises 1, 2, and/or 3 CDRs from one of SEQ ID NOS:1-2804. The CDR may be one that has been determined by Kabat, IMGT, or Chothia. In further embodiments, a polypeptide may have CDRs that have 1, 2, and/or 3 amino acid changes (e.g., addition of 1 or 2 amino acids, deletions of 1 or 2 amino acids, substitution) with respect to these 1, 2, or 3 CDRs. In some aspects, a polypeptide comprises additionally or alternatively, an amino acid sequence that is at least 60, 65, 70, 75, 80, 85, 90, 95, 96, 97, 98, 99, or 100% identical or homologous to the amino acid sequence of the variable region that is not a CDR sequence, i.e., the variable region framework.

[0330] From amino to carboxy terminus the CDRs are CDR1, CDR2, and CDR3. In some embodiments, a polypeptide may have CDRs that have 1, 2, and/or 3 amino acid changes (e.g., addition of 1 or 2 amino acids, deletions of 1 or 2 amino acids, substitution) with respect to CDR1, CDR2, or CDR3. In some embodiments, the CDRs of SEQ ID NOS:1-2804 may further comprise 1, 2, 3, 4, 5, or 6 additional amino acids at the amino or carboxy terminus of the CDR, The additional amino acids may be from the heavy and/or light chain framework regions of SEQ ID NOS:44-76, that are shown as immediately adjacent to the CDRs. Accordingly, embodiments relate to polypeptides comprising an HCDR1 (i.e., CDR-H1), HCDR2 (i e., CDR-H2), HCDR3 (i.e., CDR-H3), LCDR1 (i.e., CDR-L1), LCDR2 (i. e., CDR-L2), and/or LCDR3 (i.e., CDR-L3) with at least or at most or exactly 1, 2, 3, 4, 5, 6 or 7 amino acids at the amino end of the CDR or at the carboxy end of the CDR, wherein the additional amino acids are the 1, 2, 3, 4, 5, 6, or 7 amino acids of Table 1 or SEQ ID NOS:1-2804 that are shown as immediately adjacent to the CDRs. Other embodiments relate to antibodies comprising one or more CDRs, wherein the CDR is a fragment of Table 1 or SEQ ID NOS:1-2804 and wherein the fragment lacks 1, 2, 3, 4, or 5 amino acids from the amino or carboxy end of the CDR. In some embodiments, the CDR may lack one, 2, 3, 4, 5, 6, or 7 amino acids from the carboxy end and may further comprise 1, 2, 3, 4, 5, 6, 7, or 8 amino acids from the framework region of the amino end of the CDR. In some embodiments, the CDR may lack one, 2, 3, 4, 5, 6, or 7 amino acids from the amino end and may further comprise 1, 2, 3, 4, 5, 6, 7, or 8 amino acids from the framework region of the carboxy end of the CDR. In further embodiments, an antibody may be alternatively or additionally humanized in regions outside the CDR(s) and/or variable region(s). In some aspects, a polypeptide comprises additionally or alternatively, an amino acid sequence that is at least 60, 65, 70, 75, 80, 85, 90, 95, 96, 97, 98, 99, or 100% identical or homologous to the amino acid sequence of the variable region that is not a CDR sequence, i.e., the variable region framework.

[0331] In other embodiments, a polypeptide or protein comprises 1, 2, 3, 4, 5, or 6 CDRs from either or both of the light and heavy variable regions of Table 1 or SEQ ID NOS:1-2804, and 1, 2, 3, 4, 5, or 6 CDRs may have 1, 2, and/or 3 amino acid changes with respect to these CDRs. In some embodiments, parts or all of the antibody sequence outside the variable region have been humanized. A protein may comprise one or more polypeptides. In some aspects, a protein may contain one or two polypeptides similar to a heavy chain polypeptide and/or 1 or 2 polypeptides similar to a light chain polypeptide.

[0332] The nucleotide as well as the protein, polypeptide, and peptide sequences for various genes have been previously disclosed, and may be found in the recognized computerized databases. Two commonly used databases are the National Center for Biotechnology Information's Genbank and GenPept databases (on the World Wide Web at ncbi.nlm.nih.gov/) and The Universal Protein Resource (UniProt; on the World Wide Web at uniprot.org). The coding regions for these genes may be amplified and/or expressed using the techniques disclosed herein or as would be known to those of ordinary skill in the art.

[0333] It is contemplated that in compositions of the disclosure, there is between about mg and about 10 mg of total polypeptide, peptide, and/or protein per ml. The concentration of protein in a composition can be about, at least about or at most about 0.001, 0.050, 0.1, 0.2, 0.3, 0.4, 0.5, 0.6, 0.7, 0.8, 0.9, 1.0, 1.5, 2.0, 2.5, 3.0, 3.5, 4.0, 4.5, 5.0, 6.0, 6.5, 7.0, 7.5, 8.0, 8.5, 9.0, 9.5, 10.0 mg/ml or more (or any range derivable therein).

### VI. Sequences

[0334] Polypeptide, antibody, and antigen binding fragment embodiments are shown below in the following tables.

TABLE 1
Antibody and antigen binding embodiments

| | | | SEQ ID |
|---|---|---|---|
| Clone | Description | Sequence | NO: |
| S20-15 | Heavy Chain | QVQLQESGPGLVRPSETLSLTCTVSGGSISSHYWSWIRQPPGKGLEWI | 1 |
| (Spike/ | | GYIYYSGSTNYNPSLKSRVTISVDTSKNQFSLKLISVTAADTAVYYCA | |
| RBD) | | RAGGVFGVVLDFDHWGRGTLVTVSSASTKGPSVFPLAPSSKSTSGGT | |
| | | AALGCLVKDYFPEPVTVSWNSGALTSGVHTFPAVLQSSG | |
| | Heavy Chain | QVQLQESGPGLVRPSETLSLTCTVSGGSISSHYWSWIRQPPGKGLEWI | 2 |
| | Variable | GYIYYSGSTNYNPSLKSRVTISVDTSKNQFSLKLISVTAADTAVYYCA | |
| | Region | RAGGVFGVVLDFDHWGRGTLVTVSS | |
| | HCDR1 | SHYWS | 3 |
| | HCDR2 | YIYYSGSTNYNPSLKS | 4 |
| | HCDR3 | AGGVFGVVLDFDH | 5 |
| | HFRW1 | QVQLQESGPGLVRPSETLSLTCTVSGGSIS | 6 |
| | HFRW2 | WIRQPPGKGLEWIG | 7 |
| | HFRW3 | RVTISVDTSKNQFSLKLISVTAADTAVYYCAR | 8 |
| | HFRW4 | WGRGTLVTVSS | 9 |
| | Light Chain | SYVLTQPPSVSVAPGQTARITCGGNNIGSKSVHWYQQKPGQAPVLVV | 10 |
| | | YDDSDRPSGIPERFSGSNSGNTATLTISRVEAGDEADYYCQVWDSSSE | |
| | | HYVFGTGTKVTVLGQPKANPTVTLFPPSSEELQANKATLVCLISDFYP | |
| | | GAVTVAWKADGSPVKAGVETTKPSKQSNNKYAASS | |
| | Light Chain | SYVLTQPPSVSVAPGQTARITCGGNNIGSKSVHWYQQKPGQAPVLVV | 11 |
| | Variable | YDDSDRPSGIPERFSGSNSGNTATLTISRVEAGDEADYYCQVWDSSSE | |
| | Region | HYVFGTGTKVTVL | |
| | LCDR1 | GGNNIGSKSVH | 12 |
| | LCDR2 | DDSDRPS | 13 |
| | LCDR3 | QVWDSSSEHYV | 14 |
| | LFRW1 | SYVLTQPPSVSVAPGQTARITC | 15 |
| | LFRW2 | WYQQKPGQAPVLVVY | 16 |
| | LFRW3 | GIPERFSGSNSGNTATLTISRVEAGDEADYYC | 17 |
| | LFRW4 | FGTGTKVTVL | 18 |
| S20-22 | Heavy Chain | QVQLQESGPGLVKPSETLSLTCTVSGGSISSFYWGWIRQPAGKGLEWI | 19 |
| (NP) | | GRFHTSGSTNYNPSFKSRVTMSVDTSKNQFSLKLTSVTAADTAVYYC | |
| | | ASGRGSSWYVGWFFDLWGRGTLVTVSSASTKGPSVFPLAPSSKSTSG | |
| | | GTAALGCLVKDYFPEPVTVSWNSGALTSGVHTFPAVLQSSG | |
| | Heavy Chain | QVQLQESGPGLVKPSETLSLTCTVSGGSISSFYWGWIRQPAGKGLEWI | 20 |
| | Variable | GRFHTSGSTNYNPSFKSRVTMSVDTSKNQFSLKLTSVTAADTAVYYC | |
| | Region | ASGRGSSWYVGWFFDLWGRGTLVTVSS | |
| | HCDR1 | SFYWG | 21 |
| | HCDR2 | RFHTSGSTNYNPSFKS | 22 |
| | HCDR3 | GRGSSWYVGWFFDL | 23 |
| | HFRW1 | QVQLQESGPGLVKPSETLSLTCTVSGGSIS | 24 |
| | HFRW2 | WIRQPAGKGLEWIG | 25 |
| | HFRW3 | RVTMSVDTSKNQFSLKLTSVTAADTAVYYCAS | 26 |
| | HFRW4 | WGRGTLVTVSS | 27 |
| | Light Chain | DIVMTQSPDSLAVSLGERATINCKSSQTVLYSSNNKNYLAWYQQKPG | 28 |
| | | QPPKLLIYWASTRESGVPDRFSGSGSGTDFTLTISSLQAGDVAVYYCQ | |
| | | QYYNTPDTFGGGTKVEINRTVAAPSVFIFPPSDEQLKSGTASVVCLLN | |
| | | NFYPREAKVQWKVDN | |
| | Light Chain | DIVMTQSPDSLAVSLGERATINCKSSQTVLYSSNNKNYLAWYQQKPG | 29 |
| | Variable | QPPKLLIYWASTRESGVPDRFSGSGSGTDFTLTISSLQAGDVAVYYCQ | |
| | Region | QYYNTPDTFGGGTKVEI | |
| | LCDR1 | KSSQTVLYSSNNKNYLA | 30 |
| | LCDR2 | WASTRES | 31 |
| | LCDR3 | QQYYNTPDT | 32 |
| | LFRW1 | DIVMTQSPDSLAVSLGERATINC | 33 |
| | LFRW2 | WYQQKPGQPPKLLIY | 34 |
| | LFRW3 | GVPDRFSGSGSGTDFTLTISSLQAGDVAVYYC | 35 |
| | LFRW4 | FGGGTKVEI | 36 |
| S20-31 | Heavy Chain | QVQLIQSGAEVKKPGASVKVSCTASGYSLNELPIQWVRQAPGKGLEW | 37 |
| (NP) | | MGEFDPEDGETIYAEKFQGRVTLTEETSTNTAYMELSSLKSEDTAAYF | |
| | | CSTGSTIGVVIYAFAIWGQGTMVTVSSASTKGPSVFPLAPCSRSTSEST | |
| | | AALGCLVKDYFPEPVTVSWNSGALTSGVHTFPAVLQSSG | |
| | Heavy Chain | QVQLIQSGAEVKKPGASVKVSCTASGYSLNELPIQWVRQAPGKGLEW | 38 |
| | Variable | MGEFDPEDGETIYAEKFQGRVTLTEETSTNTAYMELSSLKSEDTAAYF | |
| | Region | CSTGSTIGVVIYAFAIWGQGTMVTVSS | |
| | HCDR1 | ELPIQ | 39 |
| | HCDR2 | EFDPEDGETIYAEKFQG | 40 |
| | HCDR3 | GSTIGVVIYAFAI | 41 |
| | HFRW1 | QVQLIQSGAEVKKPGASVKVSCTASGYSLN | 42 |
| | HFRW2 | WVRQAPGKGLEWMG | 43 |
| | HFRW3 | RVTLTEETSTNTAYMELSSLKSEDTAAYFCST | 44 |
| | HFRW4 | WGQGTMVTVSS | 45 |
| | Light Chain | EIVLTQSPGTLSLSPGERATLSCRASQDITNNFLAWYQQKAGQAPKLFI | 46 |
| | | YGASRRAPGIPHRFSGSGSGTDFTLTISSLEPEDFAVYYCQQYGPSPTF | |
| | | GQGTKVEIKRTVAAPSVFIFPPSDEQLKSGTASVVCLLNNFYPREAKV | |
| | | QWKVDNALQSGNSQESVTEQDSKDSTYSLSSTLTLSKADYE | |
| | Light Chain | EIVLTQSPGTLSLSPGERATLSCRASQDITNNFLAWYQQKAGQAPKLFI | 47 |
| | Variable | YGASRRAPGIPHRFSGSGSGTDFTLTISSLEPEDFAVYYCQQYGPSPTF | |
| | Region | GQGTKVEIK | |
| | LCDR1 | RASQDITNNFLA | 48 |
| | LCDR2 | GASRRAP | 49 |
| | LCDR3 | QQYGPSPT | 50 |
| | LFRW1 | EIVLTQSPGTLSLSPGERATLSC | 51 |
| | LFRW2 | WYQQKAGQAPKLFIY | 52 |
| | LFRW3 | GIPHRFSGSGSGTDFTLTISSLEPEDFAVYYC | 53 |
| | LFRW4 | FGQGTKVEIK | 54 |
| S20-40 | Heavy Chain | QVQLQESGPGLVKPSETLSLTCTVSGGSISSYYWSWIRQPAGKGLEWI | 55 |
| (NP) | | GRIYTSGSTNYNPSLKSRVTMSVDTSKNQFSLKLSSVTAADTAVYYC | |
| | | ARGGSGWRFDYWGQGTLVTVSSGSASAPTLFPLVSCENSPSDTSSV | |
| | Heavy Chain | QVQLQESGPGLVKPSETLSLTCTVSGGSISSYYWSWIRQPAGKGLEWI | 56 |
| | Variable | GRIYTSGSTNYNPSLKSRVTMSVDTSKNQFSLKLSSVTAADTAVYYC | |
| | Region | ARGGSGWRFDYWGQGTLVTVSS | |
| | HCDR1 | SYYWS | 57 |
| | HCDR2 | RIYTSGSTNYNPSLKS | 58 |
| | HCDR3 | GGSGWRFDY | 59 |
| | HFRW1 | QVQLQESGPGLVKPSETLSLTCTVSGGSIS | 60 |
| | HFRW2 | WIRQPAGKGLEWIG | 61 |
| | HFRW3 | RVTMSVDTSKNQFSLKLSSVTAADTAVYYCAR | 62 |
| | HFRW4 | WGQGTLVTVSS | 63 |
| | Light Chain | QSALTQPASVSGSPGQSITISCTGTSSDVGGYNYVSWYQQHPGKAPKL | 64 |
| | | MIYDVSNRPSGVSNRFSGSKSGNTASLTISGLQAEDEADYYCSSYTSS | |
| | | STLGVFGGGTKLTVLGQPKAAPSVTLFPPSSEELQANKATLVCLISDF | |
| | | YPGAVTVAWKADSSPVKAGVETTTPSKQSNNKYAASS | |
| | Light Chain | QSALTQPASVSGSPGQSITISCTGTSSDVGGYNYVSWYQQHPGKAPKL | 65 |
| | Variable | MIYDVSNRPSGVSNRFSGSKSGNTASLTISGLQAEDEADYYCSSYTSS | |
| | Region | STLGVFGGGTKLTVL | |
| | LCDR1 | TGTSSDVGGYNYVS | 66 |
| | LCDR2 | DVSNRPS | 67 |
| | LCDR3 | SSYTSSSTLGV | 68 |
| | LFRW1 | QSALTQPASVSGSPGQSITISC | 69 |
| | LFRW2 | WYQQHPGKAPKLMIY | 70 |
| | LFRW3 | GVSNRFSGSKSGNTASLTISGLQAEDEADYYC | 71 |
| | LFRW4 | FGGGTKLTVL | 72 |
| S20-58 | Heavy Chain | QVQLQESGPGLVKPSQTLSLTCTVSGGSINSGDYYWSWIRQPPGKGLE | 73 |
| (Spike/ | | WIGYIYFSGSTYYNPSLKSRVTISLDRSKNQFSLKLSSVTAADTAVYY | |
| RBD) | | CAREESMITLGGVIVDWGQGTLVTVSSASTKGPSVFPLAPSSKSTSGG | |
| | | TAALGCLVKDYFPEPVTVSWNSGALTSGVHTFPAVLQSSG | |
| | Heavy Chain | QVQLQESGPGLVKPSQTLSLTCTVSGGSINSGDYYWSWIRQPPGKGLE | 74 |
| | Variable | WIGYIYFSGSTYYNPSLKSRVTISLDRSKNQFSLKLSSVTAADTAVYY | |
| | Region | CAREESMITLGGVIVDWGQGTLVTVSS | |
| | HCDR1 | SGDYYWS | 75 |
| | HCDR2 | YIYFSGSTYYNPSLKS | 76 |
| | HCDR3 | EESMITLGGVIVD | 77 |
| | HFRW1 | QVQLQESGPGLVKPSQTLSLTCTVSGGSIN | 78 |
| | HFRW2 | WIRQPPGKGLEWIG | 79 |
| | HFRW3 | RVTISLDRSKNQFSLKLSSVTAADTAVYYCAR | 80 |
| | HFRW4 | WGQGTLVTVSS | 81 |
| | Light Chain | DIVMTQTPLSSPVTLGQPASISCRSSQSLVHSDGDTYLSWLQQRPGQP | 82 |
| | | PRLLIYKISNRFSGVPDRFSGSGAGTDFTLKISRVEAEDVGVYYCMQA | |
| | | TQFPLTFGGGTKVEIKRTVAAPSVFIFPPSDEQLKSGTASVVCLLNNFY | |
| | | PREAKVQWKVDNALQSGNSQESVTEQDSKDSTYSLSSTLTLSKADYE | |
| | Light Chain | DIVMTQTPLSSPVTLGQPASISCRSSQSLVHSDGDTYLSWLQQRPGQP | 83 |
| | Variable | PRLLIYKISNRFSGVPDRFSGSGAGTDFTLKISRVEAEDVGVYYCMQA | |
| | Region | TQFPLTFGGGTKVEIK | |
| | LCDR1 | RSSQSLVHSDGDTYLS | 84 |
| | LCDR2 | KISNRFS | 85 |
| | LCDR3 | MQATQFPLT | 86 |
| | LFRW1 | DIVMTQTPLSSPVTLGQPASISC | 87 |
| | LFRW2 | WLQQRPGQPPRLLIY | 88 |
| | LFRW3 | GVPDRFSGSGAGTDFTLKISRVEAEDVGVYYC | 89 |
| | LFRW4 | FGGGTKVEIK | 90 |
| S20-74 | Heavy Chain | QVQLQESGPGLVKPSETLSLTCTVSGGSISSHYWSWIRQPPGKGLEQI | 91 |
| (Spike/ | | GYMYYSGSTNYNPSLKSRVIISVDTSKNQFSLKLSSVTAADTAVYYC | |
| RBD) | | AGRDQLLYGADGFDIWGQGTMVTVSSASTKGPSVFPLAPSSKSTSGG | |
| | | TAALGCLVKDYFPEPVTVSWNSGALTSGVHTFPAVLQSSG | |
| | Heavy Chain | QVQLQESGPGLVKPSETLSLTCTVSGGSISSHYWSWIRQPPGKGLEQI | 92 |
| | Variable | GYMYYSGSTNYNPSLKSRVIISVDTSKNQFSLKLSSVTAADTAVYYC | |
| | Region | AGRDQLLYGADGFDIWGQGTMVTVSS | |
| | HCDR1 | SHYWS | 93 |
| | HCDR2 | YMYYSGSTNYNPSLKS | 94 |
| | HCDR3 | RDQLLYGADGFDI | 95 |
| | HFRW1 | QVQLQESGPGLVKPSETLSLTCTVSGGSIS | 96 |
| | HFRW2 | WIRQPPGKGLEQIG | 97 |
| | HFRW3 | RVIISVDTSKNQFSLKLSSVTAADTAVYYCAG | 98 |
| | HFRW4 | WGQGTMVTVSS | 99 |
| | Light Chain | QSALTQPPSASGSPGQSVTISCTGTSSDVGGYNYVSWYQQHPGKAPK | 100 |
| | | LMIYEVSKRPSGVPDRYSGSKSGNTASLTVSGLQAEDEADYYCSSYA | |
| | | GSSNHVIFGGGTKLTVLGQPKAAPSVTLFPPSSEELQANKATLVCLISD | |
| | | FYPGAVTVAWKADSSPVKAGVETTTPSKQSNNKYAASS | |
| | Light Chain | QSALTQPPSASGSPGQSVTISCTGTSSDVGGYNYVSWYQQHPGKAPK | 101 |
| | Variable | LMIYEVSKRPSGVPDRYSGSKSGNTASLTVSGLQAEDEADYYCSSYA | |
| | Region | GSSNHVIFGGGTKLTVL | |
| | LCDR1 | TGTSSDVGGYNYVS | 102 |
| | LCDR2 | EVSKRPS | 103 |
| | LCDR3 | SSYAGSSNHVI | 104 |
| | LFRW1 | QSALTQPPSASGSPGQSVTISC | 105 |
| | LFRW2 | WYQQHPGKAPKLMIY | 106 |
| | LFRW3 | GVPDRYSGSKSGNTASLTVSGLQAEDEADYYC | 107 |
| | LFRW4 | FGGGTKLTVL | 108 |
| S20-86 | Heavy Chain | EVQLVESGGGLVQPGRSLRLSCAASGFTFGDYAMYWVRQPPGKGLE | 109 |
| (Spike) | | WVSGISWNRGTIGYADSVKGRFTISRDNAKNSLYLQMNSLTPEDTAL | |
| | | YYCAKDMLPASRFFYYMDVWGKGTTVIVSSASTKGPSVFPLAPSSKS | |
| | | TSGGTAALGCLVKDYFPEPVTVSWNSGALTSGVHTFPAVLQSSG | |
| | Heavy Chain | EVQLVESGGGLVQPGRSLRLSCAASGFTFGDYAMYWVRQPPGKGLE | 110 |
| | Variable | WVSGISWNRGTIGYADSVKGRFTISRDNAKNSLYLQMNSLTPEDTAL | |
| | Region | YYCAKDMLPASRFFYYMDVWGKGTTVIVSS | |
| | HCDR1 | DYAMY | 111 |
| | HCDR2 | GISWNRGTIGYADSVKG | 112 |
| | HCDR3 | DMLPASRFFYYMDV | 113 |
| | HFRW1 | EVQLVESGGGLVQPGRSLRLSCAASGFTFG | 114 |
| | HFRW2 | WVRQPPGKGLEWVS | 115 |
| | HFRW3 | RFTISRDNAKNSLYLQMNSLTPEDTALYYCAK | 116 |
| | HFRW4 | WGKGTTVIVSS | 117 |
| | Light Chain | QSALTQPASVSGSPGQSITISCTGTSSDVGGYNYVSWYQQHPGKAPKL | 118 |
| | | MIYDVSNRPSGVSNRFSGSKSGNTASLTISGLQAEDEADYYCSSYTSS | |
| | | STLGVFGTGTKVTVLGQPKANPTVTLFPPSSEELQANKATLVCLISDF | |
| | | YPGAVTVAWKADGSPVKAGVETTKPSKQSNNKYAASS | |
| | Light Chain | QSALTQPASVSGSPGQSITISCTGTSSDVGGYNYVSWYQQHPGKAPKL | 119 |
| | Variable | MIYDVSNRPSGVSNRFSGSKSGNTASLTISGLQAEDEADYYCSSYTSS | |
| | Region | STLGVFGTGTKVTVL | |
| | LCDR1 | TGTSSDVGGYNYVS | 120 |
| | LCDR2 | DVSNRPS | 121 |
| | LCDR3 | SSYTSSSTLGV | 122 |
| | LFRW1 | QSALTQPASVSGSPGQSITISC | 123 |
| | LFRW2 | WYQQHPGKAPKLMIY | 124 |
| | LFRW3 | GVSNRFSGSKSGNTASLTISGLQAEDEADYYC | 125 |
| | LFRW4 | FGTGTKVTVL | 126 |
| S24-68 | Heavy Chain | QVQLQESGPGLVKPSETLSLTCTVSGGSITSYYWSWIRQPPGKGLEWI | 127 |
| (ORF8) | | EYIHYSGSTNYNPSLKSRVTISVDTSKNQFSLKLSSVTAADTAVYYCA | |
| | | RLLKYSRGGCYFDHWGQGTLVTVSSASTKGPSVFPLAPSSKSTSGGT | |
| | | AALGCLVKDYFPEPVTVSWNSGALTSGVHTFPAVLQSSG | |
| | Heavy Chain | QVQLQESGPGLVKPSETLSLTCTVSGGSITSYYWSWIRQPPGKGLEWI | 128 |
| | Variable | EYIHYSGSTNYNPSLKSRVTISVDTSKNQFSLKLSSVTAADTAVYYCA | |
| | Region | RLLKYSRGGCYFDHWGQGTLVTVSS | |
| | HCDR1 | SYYWS | 129 |
| | HCDR2 | YIHYSGSTNYNPSLKS | 130 |
| | HCDR3 | LLKYSRGGCYFDH | 131 |
| | HFRW1 | QVQLQESGPGLVKPSETLSLTCTVSGGSIT | 132 |
| | HFRW2 | WIRQPPGKGLEWIE | 133 |
| | HFRW3 | RVTISVDTSKNQFSLKLSSVTAADTAVYYCAR | 134 |
| | HFRW4 | WGQGTLVTVSS | 135 |
| | Light Chain | QSVLTQPPSASGTPGQRVTISCSGSSSNIGGNPVNWYQQLPGTAPKLLI | 136 |
| | | YSNNQRPSGVPDRFSGSKSGTSASLAISGLQSEDEADYYCAAWDDSL | |
| | | KGPVFGGGTKLTVLGQPKAAPSVTLFPPSSEELQANKATLVCLISDFY | |
| | | PGAVTVAWKADSSPVKAGVETTTPSKQSNNKYAASSYLSLTPEQWK | |
| | | SH | |
| | Light Chain | QSVLTQPPSASGTPGQRVTISCSGSSSNIGGNPVNWYQQLPGTAPKLLI | 137 |
| | Variable | YSNNQRPSGVPDRFSGSKSGTSASLAISGLQSEDEADYYCAAWDDSL | |
| | Region | KGPVFGGGTKLTVL | |
| | LCDR1 | SGSSSNIGGNPVN | 138 |
| | LCDR2 | SNNQRPS | 139 |
| | LCDR3 | AAWDDSLKGPV | 140 |
| | LFRW1 | QSVLTQPPSASGTPGQRVTISC | 141 |
| | LFRW2 | WYQQLPGTAPKLLIY | 142 |
| | LFRW3 | GVPDRFSGSKSGTSASLAISGLQSEDEADYYC | 143 |
| | LFRW4 | FGGGTKLTVL | 144 |
| S24-105 | Heavy Chain | EVQLVESGGGLVQPGGSLRLSCAASGFTLSSYSMNWVRQAPGKGLE | 145 |
| (ORF8) | | WVSYISSSSSTIYYADSVKGRFTISKDNAKNSLYLQMNSLRAEDTAVY | |
| | | YCAVGRGYFVYWGQGTLVTVSSASTKGPSVFPLAPSSKSTSGGTAAL | |
| | | GCLVKDYFPEPVTVSWNSGALTSGVHTFPAVLQSSG | |
| | Heavy Chain | EVQLVESGGGLVQPGGSLRLSCAASGFTLSSYSMNWVRQAPGKGLE | 146 |
| | Variable | WVSYISSSSSTIYYADSVKGRFTISKDNAKNSLYLQMNSLRAEDTAVY | |
| | Region | YCAVGRGYFVYWGQGTLVTVSS | |
| | HCDR1 | SYSMN | 147 |
| | HCDR2 | YISSSSSTIYYADSVKG | 148 |
| | HCDR3 | GRGYFVY | 149 |
| | HFRW1 | EVQLVESGGGLVQPGGSLRLSCAASGFTLS | 150 |
| | HFRW2 | WVRQAPGKGLEWVS | 151 |
| | HFRW3 | RFTISKDNAKNSLYLQMNSLRAEDTAVYYCAV | 152 |
| | HFRW4 | WGQGTLVTVSS | 153 |
| | Light Chain | EIVLTQSPGTLSLSPGERATLSCRASQSVSSGYLAWYQQKPGQAPRLLI | 154 |
| | | FGASSRATGIPDRFSGSGSGTDFTLTINRLEPEDFAVYYCQQYGSSRTF | |
| | | GQGTKVEIKRTVAAPSVFIFPPSDEQLKSGTASVVCLLNNFYPREAKV | |
| | | QWKVDNALQSGNSQESVTEQDSKDSTYSLSSTLTLSKADYE | |
| | Light Chain | EIVLTQSPGTLSLSPGERATLSCRASQSVSSGYLAWYQQKPGQAPRLLI | 155 |
| | Variable | FGASSRATGIPDRFSGSGSGTDFTLTINRLEPEDFAVYYCQQYGSSRTF | |
| | Region | GQGTKVEIK | |
| | LCDR1 | RASQSVSSGYLA | 156 |
| | LCDR2 | GASSRAT | 157 |
| | LCDR3 | QQYGSSRT | 158 |
| | LFRW1 | EIVLTQSPGTLSLSPGERATLSC | 159 |
| | LFRW2 | WYQQKPGQAPRLLIF | 160 |
| | LFRW3 | GIPDRFSGSGSGTDFTLTINRLEPEDFAVYYC | 161 |
| | LFRW4 | FGQGTKVEIK | 162 |
| S24-178 | Heavy Chain | QVQLVESGGGVVQPGRSLRLSCAASGFTFSSYGMHWVRQAPGKGLE | 163 |
| (NP) | | WVAVIWYDGSNKYYADSVKGRFTISRDNSKNTLYLQMNSLRAEDTA | |
| | | VYYCARIEGYSYGDVRVYYYYGMDVWGQGTTVTVSSASTKGPSVFP | |
| | | LAPSSKSTSGGTAALGCLVKDYFPEPVTVSWNSGALTSGVHTFPAVL | |
| | | QSSG | |
| | Heavy Chain | QVQLVESGGGVVQPGRSLRLSCAASGFTFSSYGMHWVRQAPGKGLE | 164 |
| | Variable | WVAVIWYDGSNKYYADSVKGRFTISRDNSKNTLYLQMNSLRAEDTA | |
| | Region | VYYCARIEGYSYGDVRVYYYYGMDVWGQGTTVTVSS | |
| | HCDR1 | SYGMH | 165 |
| | HCDR2 | VIWYDGSNKYYADSVKG | 166 |
| | HCDR3 | IEGYSYGDVRVYYYYGMDV | 167 |
| | HFRW1 | QVQLVESGGGVVQPGRSLRLSCAASGFTFS | 168 |
| | HFRW2 | WVRQAPGKGLEWVA | 169 |
| | HFRW3 | RFTISRDNSKNTLYLQMNSLRAEDTAVYYCAR | 170 |
| | HFRW4 | WGQGTTVTVSS | 171 |
| | Light Chain | QSALTQPASVSGSPGQSITISCTGTTSDVGGYDYVSWYQQHPGKAPKL | 172 |
| | | ILSEVSNRPSGVSNRFSGSKSGNTASLTISGLQAEDEADYYCSSYPSSS | |
| | | TLVFGTGTKVTVLGQPKANPTVTLFPPSSEELQANKATLVCLISDFYP | |
| | | GAVTVAWKADGSPVKAGVETTTPSKQSNNKYAASS | |
| | Light Chain | QSALTQPASVSGSPGQSITISCTGTTSDVGGYDYVSWYQQHPGKAPKL | 173 |
| | Variable | ILSEVSNRPSGVSNRFSGSKSGNTASLTISGLQAEDEADYYCSSYPSSS | |
| | Region | TLVFGTGTKVTVL | |
| | LCDR1 | TGTTSDVGGYDYVS | 174 |
| | LCDR2 | EVSNRPS | 175 |
| | LCDR3 | SSYPSSSTLV | 176 |
| | LFRW1 | QSALTQPASVSGSPGQSITISC | 177 |
| | LFRW2 | WYQQHPGKAPKLILS | 178 |
| | LFRW3 | GVSNRFSGSKSGNTASLTISGLQAEDEADYYC | 179 |
| | LFRW4 | FGTGTKVTVL | 180 |
| S24-188 | Heavy Chain | QVHLVQSGAEVKKPGSSVKVSCKASGGTFSSCAISWVRQAPGQGLE | 181 |
| (NP) | | WMGRIIPILGIANYAQKFQGRVTITADKSTSTAYMELSSLRSEDTAVY | |
| | | YCARGWEFGSGSYYRTDYYYYAMDVWGQGTTVTVSSASTKGPSVF | |
| | | PLAPCSRSTSGGTAALGCLVKDYFPEPVTVSWNSGALTSGVHTFPAV | |
| | | LQSSG | |
| | Heavy Chain | QVHLVQSGAEVKKPGSSVKVSCKASGGTFSSCAISWVRQAPGQGLE | 182 |
| | Variable | WMGRIIPILGIANYAQKFQGRVTITADKSTSTAYMELSSLRSEDTAVY | |
| | Region | YCARGWEFGSGSYYRTDYYYYAMDVWGQGTTVTVSS | |
| | HCDR1 | SCAIS | 183 |
| | HCDR2 | RIIPILGIANYAQKFQG | 184 |
| | HCDR3 | GWEFGSGSYYRTDYYYYAMDV | 185 |
| | HFRW1 | QVHLVQSGAEVKKPGSSVKVSCKASGGTFS | 186 |
| | HFRW2 | WVRQAPGQGLEWMG | 187 |
| | HFRW3 | RVTITADKSTSTAYMELSSLRSEDTAVYYCAR | 188 |
| | HFRW4 | WGQGTTVTVSS | 189 |
| | Light Chain | QSALTQPASVSGSPGQSITISCTGTSSDVGGYNYVSWYQQHPGKAPKL | 190 |
| | | MIYEVTNRPSGVSNRFSGSRSGNTASLTISGLQAEDEADYYCSSYTSSS | |
| | | LYVFGTGTKVAVLGQPKANPTVTLFPPSSEELQANKATLVCLISDFYP | |
| | | GAVTVAWKADSSPVKAGVETTKPSKQSNNKYAASS | |
| | Light Chain | QSALTQPASVSGSPGQSITISCTGTSSDVGGYNYVSWYQQHPGKAPKL | 191 |
| | Variable | MIYEVTNRPSGVSNRFSGSRSGNTASLTISGLQAEDEADYYCSSYTSSS | |
| | Region | LYVFGTGTKVAVL | |
| | LCDR1 | TGTSSDVGGYNYVS | 192 |
| | LCDR2 | EVTNRPS | 193 |
| | LCDR3 | SSYTSSSLYV | 194 |
| | LFRW1 | QSALTQPASVSGSPGQSITISC | 195 |
| | LFRW2 | WYQQHPGKAPKLMIY | 196 |
| | LFRW3 | GVSNRFSGSRSGNTASLTISGLQAEDEADYYC | 197 |
| | LFRW4 | FGTGTKVAVL | 198 |
| S24-202 | Heavy Chain | EVQLVQSGAEVKKPGESLRISCKGSGYSFSSYWISWVRQMPGKGLEW | |
| (NP) | | MGRIDPSDSNTNYSPSFQGHVTISADKSISTAYLQWSSLKASDTAMYY | |
| | | CARLSVRVWFGELPHYGMDVWGQGTTVTVSSASTKGPSVFPLAPSS | |
| | | KSTSGGTAALGCLVKDYFPEPVTVSWNSGALTSGVHTFPAVLQSSG | 199 |
| | Heavy Chain | EVQLVQSGAEVKKPGESLRISCKGSGYSFSSYWISWVRQMPGKGLEW | 200 |
| | Variable | MGRIDPSDSNTNYSPSFQGHVTISADKSISTAYLQWSSLKASDTAMYY | |
| | Region | CARLSVRVWFGELPHYGMDVWGQGTTVTVSS | |
| | HCDR1 | SYWIS | 201 |
| | HCDR2 | RIDPSDSNTNYSPSFQG | 202 |
| | HCDR3 | LSVRVWFGELPHYGMDV | 203 |
| | HFRW1 | EVQLVQSGAEVKKPGESLRISCKGSGYSFS | 204 |
| | HFRW2 | WVRQMPGKGLEWMG | 205 |
| | HFRW3 | HVTISADKSISTAYLQWSSLKASDTAMYYCAR | 206 |
| | HFRW4 | WGQGTTVTVSS | 207 |
| | Light Chain | EIVLTQSPATLSLSPGERATLSCRASQSVSSYLAWYQQKPGQAPRLLIY | 208 |
| | | DASNRASGIPARFSGSGSGTDFTLTISSLEPEDFAVYYCQQRRNWPLTF | |
| | | GGGTKVETKRTVAAPSVFIFPPSDEQLKSGTASVVCLLNNFYPREAKV | |
| | | QWKVDN | |
| | Light Chain | EIVLTQSPATLSLSPGERATLSCRASQSVSSYLAWYQQKPGQAPRLLIY | 209 |
| | Variable | DASNRASGIPARFSGSGSGTDFTLTISSLEPEDFAVYYCQQRRNWPLTF | |
| | Region | GGGTKVETK | |
| | LCDR1 | RASQSVSSYLA | 210 |
| | LCDR2 | DASNRAS | 211 |
| | LCDR3 | QQRRNWPLT | 212 |
| | LFRW1 | EIVLTQSPATLSLSPGERATLSC | 213 |
| | LFRW2 | WYQQKPGQAPRLLIY | 214 |
| | LFRW3 | GIPARFSGSGSGTDFTLTISSLEPEDFAVYYC | 215 |
| | LFRW4 | FGGGTKVETK | 216 |
| S24-278 | Heavy Chain | QVQLVQSGAEVKKPGASVKVSCKASGYTFTGYYMHWVRQAPGQGL | 217 |
| (ORF8) | | EWMGWINPNSGDTNYAQKFQGWVTMTRDTSLSTAYMELSRLKSDD | |
| | | TAVYYCARVGVGEYSGRHYYYYGMDVWGQGTTVTVSSASTKGPSV | |
| | | FPLAPSSKSTSGGTAALGCLVKDYFPEPVTVSWNSGALTSGVHTFPAV | |
| | | LQSSG | |
| | Heavy Chain | QVQLVQSGAEVKKPGASVKVSCKASGYTFTGYYMHWVRQAPGQGL | 218 |
| | Variable | EWMGWINPNSGDTNYAQKFQGWVTMTRDTSLSTAYMELSRLKSDD | |
| | Region | TAVYYCARVGVGEYSGRHYYYYGMDVWGQGTTVTVSS | |
| | HCDR1 | GYYMH | 219 |
| | HCDR2 | WINPNSGDTNYAQKFQG | 220 |
| | HCDR3 | VGVGEYSGRHYYYYGMDV | 221 |
| | HFRW1 | QVQLVQSGAEVKKPGASVKVSCKASGYTFT | 222 |
| | HFRW2 | WVRQAPGQGLEWMG | 223 |
| | HFRW3 | WVTMTRDTSLSTAYMELSRLKSDDTAVYYCAR | 224 |
| | HFRW4 | WGQGTTVTVSS | 225 |
| | Light Chain | EIVLTQSPGTLSLSPGERATLSCRASQSISSSYLAWYQQKPGQAPRLLI | 226 |
| | | YGASSRATGIPDRFSGSGSGTDFTLTISRLEPEDFAVYYCQQYGSSLTF | |
| | | GGGTKVEIKRTVAAPSVFIFPPSDEQLKSGTASVVCLLNNFYPREAKV | |
| | | QWKVDN | |
| | Light Chain | EIVLTQSPGTLSLSPGERATLSCRASQSISSSYLAWYQQKPGQAPRLLI | 227 |
| | Variable | YGASSRATGIPDRFSGSGSGTDFTLTISRLEPEDFAVYYCQQYGSSLTF | |
| | Region | GGGTKVEIK | |
| | LCDR1 | RASQSISSSYLA | 228 |
| | LCDR2 | GASSRAT | 229 |
| | LCDR3 | QQYGSSLT | 230 |
| | LFRW1 | EIVLTQSPGTLSLSPGERATLSC | 231 |
| | LFRW2 | WYQQKPGQAPRLLIY | 232 |
| | LFRW3 | GIPDRFSGSGSGTDFTLTISRLEPEDFAVYYC | 233 |
| | LFRW4 | FGGGTKVEIK | 234 |
| S24-339 | Heavy Chain | EVQLVESGGGLVQPGRSLRLSCTASGFTFGDYAMSWFRQAPGKGLE | 235 |
| (Spike/ | | WVGFIRSKAYGGTTQHAASVKGRFTISRDDSKSIAYLQMNSLKTEDT | |
| RBD) | | AVYHCARDGYDCSGGRCYSHIFDYWGQGTLVTVSSGESSPPPL*VHL | |
| | | GRLSLPGSQGQSLV | |
| | Heavy Chain | EVQLVESGGGLVQPGRSLRLSCTASGFTFGDYAMSWFRQAPGKGLE | 236 |
| | Variable | WVGFIRSKAYGGTTQHAASVKGRFTISRDDSKSIAYLQMNSLKTEDT | |
| | Region | AVYHCARDGYDCSGGRCYSHIFDYWGQGTLVTVSS | |
| | HCDR1 | DYAMS | 237 |
| | HCDR2 | FIRSKAYGGTTQHAASVKG | 238 |
| | HCDR3 | DGYDCSGGRCYSHIFDY | 239 |
| | HFRW1 | EVQLVESGGGLVQPGRSLRLSCTASGFTFG | 240 |
| | HFRW2 | WFRQAPGKGLEWVG | 241 |
| | HFRW3 | RFTISRDDSKSIAYLQMNSLKTEDTAVYHCAR | 242 |
| | HFRW4 | WGQGTLVTVSS | 243 |
| | Light Chain | EIVMTQSPATLSVSPGERATLSCRASQSVSSNLAWYQQKPGQAPRLLI | 244 |
| | | YGASTRATGIPARFSGSGSGTEFTLTISSLQSEDFAVYYCQQYDNWWT | |
| | | FGQGTKVEIKRTVAAPSVFIFPPSDEQLKSGTASVVCLLNNFYPREAK | |
| | | VQWKVDN | |
| | Light Chain | EIVMTQSPATLSVSPGERATLSCRASQSVSSNLAWYQQKPGQAPRLLI | 245 |
| | Variable | YGASTRATGIPARFSGSGSGTEFTLTISSLQSEDFAVYYCQQYDNWWT | |
| | Region | FGQGTKVEIK | |
| | LCDR1 | RASQSVSSNLA | 246 |
| | LCDR2 | GASTRAT | 247 |
| | LCDR3 | QQYDNWWT | 248 |
| | LFRW1 | EIVMTQSPATLSVSPGERATLSC | 249 |
| | LFRW2 | WYQQKPGQAPRLLIY | 250 |
| | LFRW3 | GIPARFSGSGSGTEFTLTISSLQSEDFAVYYC | 251 |
| | LFRW4 | FGQGTKVEIK | 252 |
| S24-472 | Heavy Chain | QVQLQESGPGLVKPSGTLSLTCAVSGGSISSINWWSWVRQPPGKGLE | 253 |
| (ORF8) | | WIGEIYHSGNTNYNPSLKSRVTISGDKSKNQFSLKLSSVTAADTAVYY | |
| | | CARGYYDSSPYYEPQGIDYWGQGILVTVSSASTKGPSVFPLAPSSKST | |
| | | SGGTAALGCLVKDYFPEPVTVSWNSGALTSGVHTFPAVLQSSG | |
| | Heavy Chain | QVQLQESGPGLVKPSGTLSLTCAVSGGSISSINWWSWVRQPPGKGLE | 254 |
| | Variable | WIGEIYHSGNTNYNPSLKSRVTISGDKSKNQFSLKLSSVTAADTAVYY | |
| | Region | CARGYYDSSPYYEPQGIDYWGQGILVTVSS | |
| | HCDR1 | SINWWS | 255 |
| | HCDR2 | EIYHSGNTNYNPSLKS | 256 |
| | HCDR3 | GYYDSSPYYEPQGIDY | 257 |
| | HFRW1 | QVQLQESGPGLVKPSGTLSLTCAVSGGSIS | 258 |
| | HFRW2 | WVRQPPGKGLEWIG | 259 |
| | HFRW3 | RVTISGDKSKNQFSLKLSSVTAADTAVYYCAR | 260 |
| | HFRW4 | WGQGILVTVSS | 261 |
| | Light Chain | QLVLTQSPSASASLGASVKLTCTLSSGHSSYTIAWHQQQPEKGPRYL | 262 |
| | | MKVNSDGSHTKGDGIPDRFSGSSSGAERYLTISSLQSEDEADYYCQT | |
| | | WGTGIRVFGGGTKLTVLGQPKAAPSVTLFPPSSEELQANKATLVCLIS | |
| | | DFYPGAVTVAWKADSSPVKAGVETTTPSKQSNNKYAASS | |
| | Light Chain | QLVLTQSPSASASLGASVKLTCTLSSGHSSYTIAWHQQQPEKGPRYL | 263 |
| | Variable | MKVNSDGSHTKGDGIPDRFSGSSSGAERYLTISSLQSEDEADYYCQT | |
| | Region | WGTGIRVFGGGTKLTVL | |
| | LCDR1 | TLSSGHSSYTIA | 264 |
| | LCDR2 | VNSDGSHTKGD | 265 |
| | LCDR3 | QTWGTGIRV | 266 |
| | LFRW1 | QLVLTQSPSASASLGASVKLTC | 267 |
| | LFRW2 | WHQQQPEKGPRYLMK | 268 |
| | LFRW3 | GIPDRFSGSSSGAERYLTISSLQSEDEADYYC | 269 |
| | LFRW4 | FGGGTKLTVL | 270 |
| S24-490 | Heavy Chain | QVQLVQSGAEVKKPGASVKVSCKASGYTFTSYFIHWVRQAPGQGLE | 271 |
| (ORF8) | | WMGIINPSGGSTSYAQKFQGRVTMTRDTSTSTVYMELSSLRSEDTAV | |
| | | YYCARHTTPTRYFDYWGQGTLVTVSSGSASAPTLFPLVSCENSPSDTS | |
| | | SV | |
| | Heavy Chain | QVQLVQSGAEVKKPGASVKVSCKASGYTFTSYFIHWVRQAPGQGLE | 272 |
| | Variable | WMGIINPSGGSTSYAQKFQGRVTMTRDTSTSTVYMELSSLRSEDTAV | |
| | Region | YYCARHTTPTRYFDYWGQGTLVTVSS | |
| | HCDR1 | SYFIH | 273 |
| | HCDR2 | IINPSGGSTSYAQKFQG | 274 |
| | HCDR3 | HTTPTRYFDY | 275 |
| | HFRW1 | QVQLVQSGAEVKKPGASVKVSCKASGYTFT | 276 |
| | HFRW2 | WVRQAPGQGLEWMG | 277 |
| | HFRW3 | RVTMTRDTSTSTVYMELSSLRSEDTAVYYCAR | 278 |
| | HFRW4 | WGQGTLVTVSS | 279 |
| | Light Chain | EIVLTQSPGTLSLSPGERATLSCRASQSVTSSYLAWYQQRRGQAPRLLI | 280 |
| | | YGASSRATGIPDRFSGSGSGTDFTLTISRLEPEDFAVYYCQQYGSSPLT | |
| | | FGGGTKVEIKRTVAAPSVFIFPPSDEQLKSGTASVVCLLNNFYPREAK | |
| | | VQWKVDN | |
| | Light Chain | EIVLTQSPGTLSLSPGERATLSCRASQSVTSSYLAWYQQRRGQAPRLLI | 281 |
| | Variable | YGASSRATGIPDRFSGSGSGTDFTLTISRLEPEDFAVYYCQQYGSSPLT | |
| | Region | FGGGTKVEIK | |
| | LCDR1 | RASQSVTSSYLA | 282 |
| | LCDR2 | GASSRAT | 283 |
| | LCDR3 | QQYGSSPLT | 284 |
| | LFRW1 | EIVLTQSPGTLSLSPGERATLSC | 285 |
| | LFRW2 | WYQQRRGQAPRLLIY | 286 |
| | LFRW3 | GIPDRFSGSGSGTDFTLTISRLEPEDFAVYYC | 287 |
| | LFRW4 | FGGGTKVEIK | 288 |
| S24-494 | Heavy Chain | QLQLQESGPGLVKPSETLSLTCTVSGGSISSSSYYWGWIRQPPGKGLE | 289 |
| (Spike/ | | WIGSIYYSGSTYYNPSLKSRVTISVDTSKNQFSLKLSSVTAADTAVYY | |
| RBD) | | CARKPRSDYGYFDLWGRGTLVTVSSASTKGPSV | |
| | Heavy Chain | QLQLQESGPGLVKPSETLSLTCTVSGGSISSSSYYWGWIRQPPGKGLE | 290 |
| | Variable | WIGSIYYSGSTYYNPSLKSRVTISVDTSKNQFSLKLSSVTAADTAVYY | |
| | Region | CARKPRSDYGYFDLWGRGTLVTVSS | |
| | HCDR1 | SSSYYWG | 291 |
| | HCDR2 | SIYYSGSTYYNPSLKS | 292 |
| | HCDR3 | KPRSDYGYFDL | 293 |
| | HFRW1 | QLQLQESGPGLVKPSETLSLTCTVSGGSIS | 294 |
| | HFRW2 | WIRQPPGKGLEWIG | 295 |
| | HFRW3 | RVTISVDTSKNQFSLKLSSVTAADTAVYYCAR | 296 |
| | HFRW4 | WGRGTLVTVSS | 297 |
| | Light Chain | DIQMTQSPSSLSASVGDRVTITCRASQSISSYLNWYQQKPGKAPKLLIY | 298 |
| | | AASSLQSGVPSRFSGSGSGTDFTLTISSLQPEDFATYYCQQSYSTPQLT | |
| | | FGGGTKVEIKRTVAAPSVFIFPPSDEQLKSGTASVVCLLNNFYPREAK | |
| | | VQWKVDN | |
| | Light Chain | DIQMTQSPSSLSASVGDRVTITCRASQSISSYLNWYQQKPGKAPKLLIY | 299 |
| | Variable | AASSLQSGVPSRFSGSGSGTDFTLTISSLQPEDFATYYCQQSYSTPQLT | |
| | Region | FGGGTKVEIK | |
| | LCDR1 | RASQSISSYLN | 300 |
| | LCDR2 | AASSLQS | 301 |
| | LCDR3 | QQSYSTPQLT | 302 |
| | LFRW1 | DIQMTQSPSSLSASVGDRVTITC | 303 |
| | LFRW2 | WYQQKPGKAPKLLIY | 304 |
| | LFRW3 | GVPSRFSGSGSGTDFTLTISSLQPEDFATYYC | 305 |
| | LFRW4 | FGGGTKVEIK | 306 |
| S24-566 | Heavy Chain | EVQLVESGGGLVKPGRSLRLSCTASGFTFGDYAMSWFRQAPGKGLE | 307 |
| (ORF8) | | WVGFTRRKAYGGTTEYAASVKGRFTISRDDSKSIAYLQMNSLKTEDT | |
| | | AVYYCTRIKVGRFDLTDSGSYRYFDYWGQGTLVTVSSASTKGPSVFP | |
| | | LAPSSKSTSGGTAALGCLVKDYFPEPVTVSWNSGALTSGVHTFPAVL | |
| | | QSSG | |
| | Heavy Chain | EVQLVESGGGLVKPGRSLRLSCTASGFTFGDYAMSWFRQAPGKGLE | 308 |
| | Variable | WVGFTRRKAYGGTTEYAASVKGRFTISRDDSKSIAYLQMNSLKTEDT | |
| | Region | AVYYCTRIKVGRFDLTDSGSYRYFDYWGQGTLVTVSS | |
| | HCDR1 | DYAMS | 309 |
| | HCDR2 | FTRRKAYGGTTEYAASVKG | 310 |
| | HCDR3 | IKVGRFDLTDSGSYRYFDY | 311 |
| | HFRW1 | EVQLVESGGGLVKPGRSLRLSCTASGFTFG | 312 |
| | HFRW2 | WFRQAPGKGLEWVG | 313 |
| | HFRW3 | RFTISRDDSKSIAYLQMNSLKTEDTAVYYCTR | 314 |
| | HFRW4 | WGQGTLVTVSS | 315 |
| | Light Chain | DIVMTQSPLSLPVTPGEPASISCRSSQSLLHSNGYNYLDWYLQKPGQS | 316 |
| | | PQLLIYLGSNRASGVPDRFSGSGSGTDFTLKISRVEAEDVGVYYCMQP | |
| | | LQTPWTFGQGTKVEIKRTVAAPSVFIFPPSDEQLKSGTASVVCLLNNF | |
| | | YPREAKVQWKVDN | |
| | Light Chain | DIVMTQSPLSLPVTPGEPASISCRSSQSLLHSNGYNYLDWYLQKPGQS | 317 |
| | Variable | PQLLIYLGSNRASGVPDRFSGSGSGTDFTLKISRVEAEDVGVYYCMQP | |
| | Region | LQTPWTFGQGTKVEIK | |
| | LCDR1 | RSSQSLLHSNGYNYLD | 318 |
| | LCDR2 | LGSNRAS | 319 |
| | LCDR3 | MQPLQTPWT | 320 |
| | LFRW1 | DIVMTQSPLSLPVTPGEPASISC | 321 |
| | LFRW2 | WYLQKPGQSPQLLIY | 322 |
| | LFRW3 | GVPDRFSGSGSGTDFTLKISRVEAEDVGVYYC | 323 |
| | LFRW4 | FGQGTKVEIK | 324 |
| S24-636 | Heavy Chain | EVQLVESGGGLVQPGGSLRLSCAASGFTLSSYWMSWVRQAPGKGLE | 325 |
| (20) | | WVANIKQDGSEKYYVDSVKGRFTISRDNAKNSLYLQMNSLRAEDTA | |
| | | VYYCARDLTATWFDPWGQGTLVTVSSAPTKAPDVFPIISGCRHPKDN | |
| | | SPVVLACLITGYH | |
| | Heavy Chain | EVQLVESGGGLVQPGGSLRLSCAASGFTLSSYWMSWVRQAPGKGLE | 326 |
| | Variable | WVANIKQDGSEKYYVDSVKGRFTISRDNAKNSLYLQMNSLRAEDTA | |
| | Region | VYYCARDLTATWFDPWGQGTLVTVSS | |
| | HCDR1 | SYWMS | 327 |
| | HCDR2 | NIKQDGSEKYYVDSVKG | 328 |
| | HCDR3 | DLTATWFDP | 329 |
| | HFRW1 | EVQLVESGGGLVQPGGSLRLSCAASGFTLS | 330 |
| | HFRW2 | WVRQAPGKGLEWVA | 331 |
| | HFRW3 | RFTISRDNAKNSLYLQMNSLRAEDTAVYYCAR | 332 |
| | HFRW4 | WGQGTLVTVSS | 333 |
| | Light Chain | QTVVTQEPSFSVSPGGTVTLTCGLSSGSVSTSYYPSWYQQTPGQAPRT | 334 |
| | | LIYSTNKRSSGVPDRFSGSILGNKAALTITGAQADDESDYYCVLYMGS | |
| | | GMSVFGGGTKLTVLGQPKAAPSVTLFPPSSEELQANKATLVCLISDFY | |
| | | PGAVTVAWKADSSPVKAGVETTTPSKQSNNKYAASS | |
| | Light Chain | QTVVTQEPSFSVSPGGTVTLTCGLSSGSVSTSYYPSWYQQTPGQAPRT | 335 |
| | Variable | LIYSTNKRSSGVPDRFSGSILGNKAALTITGAQADDESDYYCVLYMGS | |
| | Region | GMSVFGGGTKLTVL | |
| | LCDR1 | GLSSGSVSTSYYPS | 336 |
| | LCDR2 | STNKRSS | 337 |
| | LCDR3 | VLYMGSGMSV | 338 |
| | LFRW1 | QTVVTQEPSFSVSPGGTVTLTC | 339 |
| | LFRW2 | WYQQTPGQAPRTLIY | 340 |
| | LFRW3 | GVPDRFSGSILGNKAALTITGAQADDESDYYC | 341 |
| | LFRW4 | FGGGTKLTVL | 342 |
| S24-740 | Heavy Chain | QVQLVQSGAEVKKPGASVKVSCKASGYTFTSYALHWVRQAPGQRLE | 343 |
| (ORF8) | | WMGWINAGNGNTKYSQRFQGRVTIIRDTSASTTYMELSSLRSEDTAV | |
| | | YYCARGYARAGVITIKESLHHWGQGTLVTVSSASTKGPSVFPLAPSSK | |
| | | STSGGTAALGCLVKDYFPEPVTVSWNSGALTSGVHTFPAVLQSSG | |
| | Heavy Chain | QVQLVQSGAEVKKPGASVKVSCKASGYTFTSYALHWVRQAPGQRLE | 344 |
| | Variable | WMGWINAGNGNTKYSQRFQGRVTIIRDTSASTTYMELSSLRSEDTAV | |
| | Region | YYCARGYARAGVITIKESLHHWGQGTLVTVSS | |
| | HCDR1 | SYALH | 345 |
| | HCDR2 | WINAGNGNTKYSQRFQG | 346 |
| | HCDR3 | GYARAGVITIKESLHH | 347 |
| | HFRW1 | QVQLVQSGAEVKKPGASVKVSCKASGYTFT | 348 |
| | HFRW2 | WVRQAPGQRLEWMG | 349 |
| | HFRW3 | RVTIIRDTSASTTYMELSSLRSEDTAVYYCAR | 350 |
| | HFRW4 | WGQGTLVTVSS | 351 |
| | Light Chain | DIVMTQSPDSLAVSLGERATINCKSSQSVLYSSNNKNYLAWYQQKPG | 352 |
| | | QPPKLLIYWASTRESGVPDRFSGSGSGTDFTLTISSLQAEDVAVYYCQ | |
| | | QYYSTPPLTFGGGTKVEIKRTVAAPSVFIFPPSDEQLKSGTASVVCLLN | |
| | | NFYPREAKVQWKVDN | |
| | Light Chain | DIVMTQSPDSLAVSLGERATINCKSSQSVLYSSNNKNYLAWYQQKPG | 353 |
| | Variable | QPPKLLIYWASTRESGVPDRFSGSGSGTDFTLTISSLQAEDVAVYYCQ | |
| | Region | QYYSTPPLTFGGGTKVEIK | |
| | LCDR1 | KSSQSVLYSSNNKNYLA | 354 |
| | LCDR2 | WASTRES | 355 |
| | LCDR3 | QQYYSTPPLT | 356 |
| | LFRW1 | DIVMTQSPDSLAVSLGERATINC | 357 |
| | LFRW2 | WYQQKPGQPPKLLIY | 358 |
| | LFRW3 | GVPDRFSGSGSGTDFTLTISSLQAEDVAVYYC | 359 |
| | LFRW4 | FGGGTKVEIK | 360 |
| S24-791 | Heavy Chain | QVQLQESGPGLVKPSETLSLTCTVSGGSISSSYWSWIRQPPGKGLEWI | 361 |
| (NP) | | GYIYYSGNTNYNPSLKSRVTLSIDTSKNQFSLKLSSVTAADTAVYYCA | |
| | | CSVTIFGVVTPAFDIWGQGTMVTVSSASTKGPSVFPLAPSSKSTSGGT | |
| | | AALGCLVKDYFPEPVTVSWNSGALTSGVHTFPAVLQSSG | |
| | Heavy Chain | QVQLQESGPGLVKPSETLSLTCTVSGGSISSSYWSWIRQPPGKGLEWI | 362 |
| | Variable | GYIYYSGNTNYNPSLKSRVTLSIDTSKNQFSLKLSSVTAADTAVYYCA | |
| | Region | CSVTIFGVVTPAFDIWGQGTMVTVSS | |
| | HCDR1 | SSYWS | 363 |
| | HCDR2 | YIYYSGNTNYNPSLKS | 364 |
| | HCDR3 | SVTIFGVVTPAFDI | 365 |
| | HFRW1 | QVQLQESGPGLVKPSETLSLTCTVSGGSIS | 366 |
| | HFRW2 | WIRQPPGKGLEWIG | 367 |
| | HFRW3 | RVTLSIDTSKNQFSLKLSSVTAADTAVYYCAC | 368 |
| | HFRW4 | WGQGTMVTVSS | 369 |
| | Light Chain | EIVLTHSPGTLSLSPGERATLSCRASQSVRSYLAWYQQKPGQAPRLLI | 370 |
| | | YGASSRATGIPDRFSGSGSGTDFTLTISRLEPDDFAVYYCQQYGSSPW | |
| | | TFGQGTKVEIKRTVAAPSVFIFPPSDEQLKSGTASVVCLLNNFYPREA | |
| | | KVQWKVDNALQSGNSQESVTEQDSKDSTYSLSSTLTLSKADYE | |
| | Light Chain | EIVLTHSPGTLSLSPGERATLSCRASQSVRSYLAWYQQKPGQAPRLLI | 371 |
| | Variable | YGASSRATGIPDRFSGSGSGTDFTLTISRLEPDDFAVYYCQQYGSSPW | |
| | Region | TFGQGTKVEIK | |
| | LCDR1 | RASQSVRSYLA | 372 |
| | LCDR2 | GASSRAT | 373 |
| | LCDR3 | QQYGSSPWT | 374 |
| | LFRW1 | EIVLTHSPGTLSLSPGERATLSC | 375 |
| | LFRW2 | WYQQKPGQAPRLLIY | 376 |
| | LFRW3 | GIPDRFSGSGSGTDFTLTISRLEPDDFAVYYC | 377 |
| | LFRW4 | FGQGTKVEIK | 378 |
| S24-902 | Heavy Chain | QVQLVQSGAEVKKPGSSVKVSCKASGGTFSSYAISWVRQAPGQGLE | 379 |
| (Spike/ | | WMGRIIPILGIANYAQKFQGRVTITADKSTSTAYMELSSLRSEDTAVY | |
| RBD) | | YCARWDFGVVIQYGMDVWGQGTTVTVSSASTKGPSVFPLAPSSKSTS | |
| | | GGTAALGCLVKDYFPEPVTVSWNSGALTSGVHTFPAVLQSSGLYSLS | |
| | | SVVTVPSSSL | |
| | Heavy Chain | QVQLVQSGAEVKKPGSSVKVSCKASGGTFSSYAISWVRQAPGQGLE | 380 |
| | Variable | WMGRIIPILGIANYAQKFQGRVTITADKSTSTAYMELSSLRSEDTAVY | |
| | Region | YCARWDFGVVIQYGMDVWGQGTTVTVSS | |
| | HCDR1 | SYAIS | 381 |
| | HCDR2 | RIIPILGIANYAQKFQG | 382 |
| | HCDR3 | WDFGVVIQYGMDV | 383 |
| | HFRW1 | QVQLVQSGAEVKKPGSSVKVSCKASGGTFS | 384 |
| | HFRW2 | WVRQAPGQGLEWMG | 385 |
| | HFRW3 | RVTITADKSTSTAYMELSSLRSEDTAVYYCAR | 386 |
| | HFRW4 | WGQGTTVTVSS | 387 |
| | Light Chain | QAVVTQEPSLTVSPGGTVTLTCGSSTGAVTSGHYPYWFQQKPGQAPR | 388 |
| | | TLIYDTSNKHSWTPARFSGSLLGGKAALTLSGAQPEDEAEYYCLLSYS | |
| | | GWVFGGGTKLTVLGQPKAAPSVTLFPPSSEELQANKATLVCLISDFYP | |
| | | GAVTVAWKADSSPVKAGVETTTPSKQSNNKYAASS | |
| | Light Chain | QAVVTQEPSLTVSPGGTVTLTCGSSTGAVTSGHYPYWFQQKPGQAPR | 389 |
| | Variable | TLIYDTSNKHSWTPARFSGSLLGGKAALTLSGAQPEDEAEYYCLLSYS | |
| | Region | GWVFGGGTKLTVL | |
| | LCDR1 | GSSTGAVTSGHYPY | 390 |
| | LCDR2 | DTSNKHS | 391 |
| | LCDR3 | LLSYSGWV | 392 |
| | LFRW1 | QAVVTQEPSLTVSPGGTVTLTC | 393 |
| | LFRW2 | WFQQKPGQAPRTLIY | 394 |
| | LFRW3 | WTPARFSGSLLGGKAALTLSGAQPEDEAEYYC | 395 |
| | LFRW4 | FGGGTKLTVL | 396 |
| S24-921 | Heavy Chain | QVQLQESGPGLVKPSETLSLTCTVSGGSINSFYWNWIRQPPGKGLEWI | 397 |
| (NP) | | GYIYYSGNTKYNPSLKSRVTISVDTSNSQFSLKLSSVTAADTAVYYCA | |
| | | ALKKQELVSLQAFDIWGQGTMVTVSSASTKGPSVFPLAPSSKSTSGGT | |
| | | AALGCLVKDYFPEPVTVSWNSGALTSGVHTFPAVLQSSG | |
| | Heavy Chain | QVQLQESGPGLVKPSETLSLTCTVSGGSINSFYWNWIRQPPGKGLEWI | 398 |
| | Variable | GYIYYSGNTKYNPSLKSRVTISVDTSNSQFSLKLSSVTAADTAVYYCA | |
| | Region | ALKKQELVSLQAFDIWGQGTMVTVSS | |
| | HCDR1 | SFYWN | 399 |
| | HCDR2 | YIYYSGNTKYNPSLKS | 400 |
| | HCDR3 | LKKQELVSLQAFDI | 401 |
| | HFRW1 | QVQLQESGPGLVKPSETLSLTCTVSGGSIN | 402 |
| | HFRW2 | WIRQPPGKGLEWIG | 403 |
| | HFRW3 | RVTISVDTSNSQFSLKLSSVTAADTAVYYCAA | 404 |
| | HFRW4 | WGQGTMVTVSS | 405 |
| | Light Chain | DIQMTQSPSSLSASLGDGVTITCRASQSISSYLSWYQQKPGKAPKLLIY | 406 |
| | | AASSLQSGVPSRFSGSGSGTDFTLTISSLQPEDFATYYCQQSYNTPVTF | |
| | | GQGTKVEIKRTVAAPSVFIFPPSDEQLKSGTASVVCLLNNFYPREAKV | |
| | | QWKVDNADRKS | |
| | Light Chain | DIQMTQSPSSLSASLGDGVTITCRASQSISSYLSWYQQKPGKAPKLLIY | 407 |
| | Variable | AASSLQSGVPSRFSGSGSGTDFTLTISSLQPEDFATYYCQQSYNTPVTF | |
| | Region | GQGTKVEIK | |
| | LCDR1 | RASQSISSYLS | 408 |
| | LCDR2 | AASSLQS | 409 |
| | LCDR3 | QQSYNTPVT | 410 |
| | LFRW1 | DIQMTQSPSSLSASLGDGVTITC | 411 |
| | LFRW2 | WYQQKPGKAPKLLIY | 412 |
| | LFRW3 | GVPSRFSGSGSGTDFTLTISSLQPEDFATYYC | 413 |
| | LFRW4 | FGQGTKVEIK | 414 |
| S24-1063 | Heavy Chain | QVQLQESGPGLVKPSETLSLTCTVSGGSISSYYWSWIRQPPGKGLEWI | 415 |
| (NP) | | GYIYYSGSTKYNPSLKSRVTISVDTSKNQFSLKLTSVTAADTAVYYCA | |
| | | RIYDSSGYYHPVFDYWGQGTLVTVSSASTKGPSVFPLAPSSKSTSGGT | |
| | | AALGCLVKDYFPEPVTVSWNSGALTSGVHTFPAVLQSSG | |
| | Heavy Chain | QVQLQESGPGLVKPSETLSLTCTVSGGSISSYYWSWIRQPPGKGLEWI | 416 |
| | Variable | GYIYYSGSTKYNPSLKSRVTISVDTSKNQFSLKLTSVTAADTAVYYCA | |
| | Region | RIYDSSGYYHPVFDYWGQGTLVTVSS | |
| | HCDR1 | SYYWS | 417 |
| | HCDR2 | YIYYSGSTKYNPSLKS | 418 |
| | HCDR3 | IYDSSGYYHPVFDY | 419 |
| | HFRW1 | QVQLQESGPGLVKPSETLSLTCTVSGGSIS | 420 |
| | HFRW2 | WIRQPPGKGLEWIG | 421 |
| | HFRW3 | RVTISVDTSKNQFSLKLTSVTAADTAVYYCAR | 422 |
| | HFRW4 | WGQGTLVTVSS | 423 |
| | Light Chain | EIVLTQSPGTLSLSPGERATLSCRASQSVSSSYLAWYQQKPGQAPRLLI | 424 |
| | | YGASSRATDIPDRFSGSGSGTDFTLTISRLEPEDFAVYYCQQYGSSPWT | |
| | | FGQGTKVEIKRTVAAPSVFIFPPSDEQLKSGTASVVCLLNNFYPREAK | |
| | | VQWKVDN | |
| | Light Chain | EIVLTQSPGTLSLSPGERATLSCRASQSVSSSYLAWYQQKPGQAPRLLI | 425 |
| | Variable | YGASSRATDIPDRFSGSGSGTDFTLTISRLEPEDFAVYYCQQYGSSPWT | |
| | Region | FGQGTKVEIK | |
| | LCDR1 | RASQSVSSSYLA | 426 |
| | LCDR2 | GASSRAT | 427 |
| | LCDR3 | QQYGSSPWT | 428 |
| | LFRW1 | EIVLTQSPGTLSLSPGERATLSC | 429 |
| | LFRW2 | WYQQKPGQAPRLLIY | 430 |
| | LFRW3 | DIPDRFSGSGSGTDFTLTISRLEPEDFAVYYC | 431 |
| | LFRW4 | FGQGTKVEIK | 432 |
| S24-1224 | Heavy Chain | QVQLVQSGAEVKKPGASVRVSCKASGYTFTSYYIYWVRQAPGQGLE | 433 |
| (Spike/ | | WMGVINPSGGSTSYAQKFQGRVTLTRDTSTSTVYMDLSSLRSEDTAV | |
| RBD) | | YYCARDPIMWEVVTRGRGNWFDPWGQGTLVTVSSASTKGPSVFPLA | |
| | | PSSKSTSGGTAALGCLVKDYFPEPVTVSWNSGALTSGVHTFPAVLQSS | |
| | | G | |
| | Heavy Chain | QVQLVQSGAEVKKPGASVRVSCKASGYTFTSYYIYWVRQAPGQGLE | 434 |
| | Variable | WMGVINPSGGSTSYAQKFQGRVTLTRDTSTSTVYMDLSSLRSEDTAV | |
| | Region | YYCARDPIMWEVVTRGRGNWFDPWGQGTLVTVSS | |
| | HCDR1 | SYYIY | 435 |
| | HCDR2 | VINPSGGSTSYAQKFQG | 436 |
| | HCDR3 | DPIMWEVVTRGRGNWFDP | 437 |
| | HFRW1 | QVQLVQSGAEVKKPGASVRVSCKASGYTFT | 438 |
| | HFRW2 | WVRQAPGQGLEWMG | 439 |
| | HFRW3 | RVTLTRDTSTSTVYMDLSSLRSEDTAVYYCAR | 440 |
| | HFRW4 | WGQGTLVTVSS | 441 |
| | Light Chain | QSVLTQPPSVSGAPGQRVTIPCTGSSFNIGAGYDVHWYQQLPGTAPKL | 442 |
| | | LIFGNSNRPSGVPDRFSGSRSGTSASLAITGLQAEDEADYYCQSYDSSL | |
| | | SGVVFGGGTTLTVLGQPKAAPSVTLFPPSSEELQANKATLVCLISDFY | |
| | | PGAVTVAWKADSSPVKAGVETTTPSKQSNNKYAASSYLSLTPEQWK | |
| | | SH | |
| | Light Chain | QSVLTQPPSVSGAPGQRVTIPCTGSSFNIGAGYDVHWYQQLPGTAPKL | 443 |
| | Variable | LIFGNSNRPSGVPDRFSGSRSGTSASLAITGLQAEDEADYYCQSYDSSL | |
| | Region | SGVVFGGGTTLTVL | |
| | LCDR1 | TGSSFNIGAGYDVH | 444 |
| | LCDR2 | GNSNRPS | 445 |
| | LCDR3 | QSYDSSLSGVV | 446 |
| | LFRW1 | QSVLTQPPSVSGAPGQRVTIPC | 447 |
| | LFRW2 | WYQQLPGTAPKLLIF | 448 |
| | LFRW3 | GVPDRFSGSRSGTSASLAITGLQAEDEADYYC | 449 |
| | LFRW4 | FGGGTTLTVL | 450 |
| S24-1271 | Heavy Chain | EVQLVESGGGLVQPGGSLRLSCAASGFTVSSNYMSWVRQAPGKGLE | 451 |
| (Spike/ | | WVSVIYSDGNTYYADSVKGRFTISRDNSKNMLYLQMNSLRAEDTAV | |
| RBD) | | YYCARDPGQGYCSGGSCAPSYSLDYWGQGTLVTVSSGSASAPTLFPL | |
| | | VSCENSPSDTSSV | |
| | Heavy Chain | EVQLVESGGGLVQPGGSLRLSCAASGFTVSSNYMSWVRQAPGKGLE | 452 |
| | Variable | WVSVIYSDGNTYYADSVKGRFTISRDNSKNMLYLQMNSLRAEDTAV | |
| | Region | YYCARDPGQGYCSGGSCAPSYSLDYWGQGTLVTVSS | |
| | HCDR1 | SNYMS | 453 |
| | HCDR2 | VIYSDGNTYYADSVKG | 454 |
| | HCDR3 | DPGQGYCSGGSCAPSYSLDY | 455 |
| | HFRW1 | EVQLVESGGGLVQPGGSLRLSCAASGFTVS | 456 |
| | HFRW2 | WVRQAPGKGLEWVS | 457 |
| | HFRW3 | RFTISRDNSKNMLYLQMNSLRAEDTAVYYCAR | 458 |
| | HFRW4 | WGQGTLVTVSS | 459 |
| | Light Chain | SYELTQPPSVSVSPGQTASITCSGDKLGDRYVCWYQQKPGQSPVLVIY | 460 |
| | | QDTKRPSGIPERFSGSNSGNTATLTISGTQAMDEADYYCQAWDSSTW | |
| | | VFGGGTKLTVLGQPKAAPSVTLFPPSSEELQANKATLVCLISDFYPGA | |
| | | VTVAWKADSSPVKAGVETTTPSKQSNNKYAASS | |
| | Light Chain | SYELTQPPSVSVSPGQTASITCSGDKLGDRYVCWYQQKPGQSPVLVIY | 461 |
| | Variable | QDTKRPSGIPERFSGSNSGNTATLTISGTQAMDEADYYCQAWDSSTW | |
| | Region | VFGGGTKLTVL | |
| | LCDR1 | SGDKLGDRYVC | 462 |
| | LCDR2 | QDTKRPS | 463 |
| | LCDR3 | QAWDSSTWV | 464 |
| | LFRW1 | SYELTQPPSVSVSPGQTASITC | 465 |
| | LFRW2 | WYQQKPGQSPVLVIY | 466 |
| | LFRW3 | GIPERFSGSNSGNTATLTISGTQAMDEADYYC | 467 |
| | LFRW4 | FGGGTKLTVL | 468 |
| S24-1339 | Heavy Chain | EVQLVESGGGLVQPGGSLRLSCAASGFTVSSNYMSWVRQAPGKGLE | 469 |
| (Spike/ | | WVSDIYSGGSTYYADSVKGRFTISRHNSKNTLYLQMNSLRAEDTAVY | |
| RBD) | | YCARDRRGYSYGLHHGMDVWGQGTTVTVSSASTKGPSVFPLAPSSK | |
| | | STSGGTAALGCLVKDYFPEPVTVSWNSGALTSGVHTFPAVLQSSG | |
| | Heavy Chain | EVQLVESGGGLVQPGGSLRLSCAASGFTVSSNYMSWVRQAPGKGLE | 470 |
| | Variable | WVSDIYSGGSTYYADSVKGRFTISRHNSKNTLYLQMNSLRAEDTAVY | |
| | Region | YCARDRRGYSYGLHHGMDVWGQGTTVTVSS | |
| | HCDR1 | SNYMS | 471 |
| | HCDR2 | DIYSGGSTYYADSVKG | 472 |
| | HCDR3 | DRRGYSYGLHHGMDV | 473 |
| | HFRW1 | EVQLVESGGGLVQPGGSLRLSCAASGFTVS | 474 |
| | HFRW2 | WVRQAPGKGLEWVS | 475 |
| | HFRW3 | RFTISRHNSKNTLYLQMNSLRAEDTAVYYCAR | 476 |
| | HFRW4 | WGQGTTVTVSS | 477 |
| | Light Chain | EIVLTQSPGTLSLSPGERATLSCRASQSVSSSYLAWYQQKPDQAPRLLI | 478 |
| | | YGASSRATGIPDRFSGSGSGTDFTLTISRLEPEDFAVYYCQQYGSSPNT | |
| | | FGQGTKLEIKRTVAAPSVFIFPPSDEQLKSGTASVVCLLNNFYPREAK | |
| | | VQWKVDN | |
| | Light Chain | EIVLTQSPGTLSLSPGERATLSCRASQSVSSSYLAWYQQKPDQAPRLLI | 479 |
| | Variable | YGASSRATGIPDRFSGSGSGTDFTLTISRLEPEDFAVYYCQQYGSSPNT | |
| | Region | FGQGTKLEIK | |
| | LCDR1 | RASQSVSSSYLA | 480 |
| | LCDR2 | GASSRAT | 481 |
| | LCDR3 | QQYGSSPNT | 482 |
| | LFRW1 | EIVLTQSPGTLSLSPGERATLSC | 483 |
| | LFRW2 | WYQQKPDQAPRLLIY | 484 |
| | LFRW3 | GIPDRFSGSGSGTDFTLTISRLEPEDFAVYYC | 485 |
| | LFRW4 | FGQGTKLEIK | 486 |
| S24-1345 | Heavy Chain | QLQLQESGPGLVKPSETLSLTCTVSGGSISSSSYYWGWIRQPPGKGLE | 487 |
| (Spike/ | | WIGSIYYSGSTYYNPSLKSRVTISVDTSKNQFSLKLSSVTAADTAVYY | |
| RBD) | | CARRIRRPTSEVVITYVFDYWGQGTLVTVSSAPTKAPDVFPIISGCRHP | |
| | | KDNSPVVLACLITGYH | |
| | Heavy Chain | QLQLQESGPGLVKPSETLSLTCTVSGGSISSSSYYWGWIRQPPGKGLE | 488 |
| | Variable | WIGSIYYSGSTYYNPSLKSRVTISVDTSKNQFSLKLSSVTAADTAVYY | |
| | Region | CARRIRRPTSEVVITYVFDYWGQGTLVTVSS | |
| | HCDR1 | SSSYYWG | 489 |
| | HCDR2 | SIYYSGSTYYNPSLKS | 490 |
| | HCDR3 | RIRRPTSEVVITYVFDY | 491 |
| | HFRW1 | QLQLQESGPGLVKPSETLSLTCTVSGGSIS | 492 |
| | HFRW2 | WIRQPPGKGLEWIG | 493 |
| | HFRW3 | RVTISVDTSKNQFSLKLSSVTAADTAVYYCAR | 494 |
| | HFRW4 | WGQGTLVTVSS | 495 |
| | Light Chain | AIQLTQSPSSLSASVGDRVTITCRASQGISSALAWYQQKPGKAPKLLIY | 496 |
| | | DASSLESGVPSRFSGSGSGTDFTLTISSLQPEDFATYYCQQFNSYLTFG | |
| | | GGTKVEIKRTVAAPSVFIFPPSDEQLKSGTASVVCLLNNFYPREAKVQ | |
| | | WKVDNALQSGNSQESVTEQDSKDSTYSLS | |
| | Light Chain | AIQLTQSPSSLSASVGDRVTITCRASQGISSALAWYQQKPGKAPKLLIY | 497 |
| | Variable | DASSLESGVPSRFSGSGSGTDFTLTISSLQPEDFATYYCQQFNSYLTFG | |
| | Region | GGTKVEIK | |
| | LCDR1 | RASQGISSALA | 498 |
| | LCDR2 | DASSLES | 499 |
| | LCDR3 | QQFNSYLT | 500 |
| | LFRW1 | AIQLTQSPSSLSASVGDRVTITC | 501 |
| | LFRW2 | WYQQKPGKAPKLLIY | 502 |
| | LFRW3 | GVPSRFSGSGSGTDFTLTISSLQPEDFATYYC | 503 |
| | LFRW4 | FGGGTKVEIK | 504 |
| S24-1378 | Heavy Chain | EVQLVESGGGLVQPGGSLRLSCAASGFTVSSNYMSWVRQAPGKGLE | 505 |
| (ORF8) | | WVSVIYSGGSTYYADSVKGRFTISRHNSKNTLYLQMNSLRAEDTAVY | |
| | | YCAREGYCTNGVCYRHAFDIWGQGTMVTVSSGSASAPTLFPLVSCEN | |
| | | SPSDTSSV | |
| | Heavy Chain | EVQLVESGGGLVQPGGSLRLSCAASGFTVSSNYMSWVRQAPGKGLE | 506 |
| | Variable | WVSVIYSGGSTYYADSVKGRFTISRHNSKNTLYLQMNSLRAEDTAVY | |
| | Region | YCAREGYCTNGVCYRHAFDIWGQGTMVTVSS | |
| | HCDR1 | SNYMS | 507 |
| | HCDR2 | VIYSGGSTYYADSVKG | 508 |
| | HCDR3 | EGYCTNGVCYRHAFDI | 509 |
| | HFRW1 | EVQLVESGGGLVQPGGSLRLSCAASGFTVS | 510 |
| | HFRW2 | WVRQAPGKGLEWVS | 511 |
| | HFRW3 | RFTISRHNSKNTLYLQMNSLRAEDTAVYYCAR | 512 |
| | HFRW4 | WGQGTMVTVSS | 513 |
| | Light Chain | QTVVTQEPSFSVSPGGTVTLTCGLSSGSVSTSYYPSWYQQTPGQAPRT | 514 |
| | | LIYSTNTRSSGVPDRFSGSILGNKAALTITGAQADDESDYYCVLYMGS | |
| | | GISVFGGGTKLTVLGQPKAAPSVTLFPPSSEELQANKATLVCLISDFYP | |
| | | GAVTVAWKADSSPVKAGVETTTPSKQSNNKYAASS | |
| | Light Chain | QTVVTQEPSFSVSPGGTVTLTCGLSSGSVSTSYYPSWYQQTPGQAPRT | 515 |
| | Variable | LIYSTNTRSSGVPDRFSGSILGNKAALTITGAQADDESDYYCVLYMGS | |
| | Region | GISVFGGGTKLTVL | |
| | LCDR1 | GLSSGSVSTSYYPS | 516 |
| | LCDR2 | STNTRSS | 517 |
| | LCDR3 | VLYMGSGISV | 518 |
| | LFRW1 | QTVVTQEPSFSVSPGGTVTLTC | 519 |
| | LFRW2 | WYQQTPGQAPRTLIY | 520 |
| | LFRW3 | GVPDRFSGSILGNKAALTITGAQADDESDYYC | 521 |
| | LFRW4 | FGGGTKLTVL | 522 |
| S24-1379 | Heavy Chain | QVQLQESGPGLVKPSETLSLTCTVSGGSISSYYWSWIRQPPGKGLEWI | 523 |
| (NP) | | GYIYYSGSTNYNPSLKSRVTISVDTSKNQFSLKLSSVTAADTAVYYCA | |
| | | RDYYQLPMDVWGQGTTVTVSSASTKGPSVFPLAPSSKSTSGGTAALG | |
| | | CLVKDYFPEPVTVSWNSGALTSGVHTFPAVLQSSG | |
| | Heavy Chain | QVQLQESGPGLVKPSETLSLTCTVSGGSISSYYWSWIRQPPGKGLEWI | 524 |
| | Variable | GYIYYSGSTNYNPSLKSRVTISVDTSKNQFSLKLSSVTAADTAVYYCA | |
| | Region | RDYYQLPMDVWGQGTTVTVSS | |
| | HCDR1 | SYYWS | 525 |
| | HCDR2 | YIYYSGSTNYNPSLKS | 526 |
| | HCDR3 | DYYQLPMDV | 527 |
| | HFRW1 | QVQLQESGPGLVKPSETLSLTCTVSGGSIS | 528 |
| | HFRW2 | WIRQPPGKGLEWIG | 529 |
| | HFRW3 | RVTISVDTSKNQFSLKLSSVTAADTAVYYCAR | 530 |
| | HFRW4 | WGQGTTVTVSS | 531 |
| | Light Chain | QSVLTQPPSASGTPGQRVTISCSGSSSNIGSNYVYWYQQLPGTAPKLLI | 532 |
| | | YRNNQRPSGVPDRFSGSKSGTSASLAISGLRSEDEADYYCAAWDDSL | |
| | | SGRVFGGGTKLTVLGQPKAAPSVTLFPPSSEELQANKATLVCLISDFY | |
| | | PGAVTVAWKADSSPVKAGVETTTPSKQSNNKYAASS | |
| | Light Chain | QSVLTQPPSASGTPGQRVTISCSGSSSNIGSNYVYWYQQLPGTAPKLLI | 533 |
| | Variable | YRNNQRPSGVPDRFSGSKSGTSASLAISGLRSEDEADYYCAAWDDSL | |
| | Region | SGRVFGGGTKLTVL | |
| | LCDR1 | SGSSSNIGSNYVY | 534 |
| | LCDR2 | RNNQRPS | 535 |
| | LCDR3 | AAWDDSLSGRV | 536 |
| | LFRW1 | QSVLTQPPSASGTPGQRVTISC | 537 |
| | LFRW2 | WYQQLPGTAPKLLIY | 538 |
| | LFRW3 | GVPDRFSGSKSGTSASLAISGLRSEDEADYYC | 539 |
| | LFRW4 | FGGGTKLTVL | 540 |
| | Heavy Chain | EVQLVESGGGLVQPGGSLRLSCAVSGFTFSSYSMNWVRQAPGKGLE | 541 |
| | | WVSYISSSSSIIYYADSVKGRFTISRDNAKNSLYLQMNSLRAEDTAVY | |
| | | YCARDFLDYSRSYSYGMDVWGQGTTVTVSSASTKGPSVFPLAPSSKS | |
| | | TSGGTAALGCLVKDYFPEPVTVSWNSGALTSGVHTFPAVLQSSG | |
| | Heavy Chain | EVQLVESGGGLVQPGGSLRLSCAVSGFTFSSYSMNWVRQAPGKGLE | 542 |
| | Variable | WVSYISSSSSIIYYADSVKGRFTISRDNAKNSLYLQMNSLRAEDTAVY | |
| | Region | YCARDFLDYSRSYSYGMDVWGQGTTVTVSS | |
| | HCDR1 | SYSMN | 543 |
| | HCDR2 | YISSSSSIIYYADSVKG | 544 |
| | HCDR3 | DFLDYSRSYSYGMDV | 545 |
| | HFRW1 | EVQLVESGGGLVQPGGSLRLSCAVSGFTFS | 546 |
| | HFRW2 | WVRQAPGKGLEWVS | 547 |
| | HFRW3 | RFTISRDNAKNSLYLQMNSLRAEDTAVYYCAR | 548 |
| | HFRW4 | WGQGTTVTVSS | 549 |
| | Light Chain | SYVLTQPPSVSVAPGQTARITCGGDNIGSKNVHWYQQKPGQAPVLVV | 550 |
| | | FDDSDRPSGIPERFSGSNSGNTATLTISRVEAGDEADYYCQVWDSSSD | |
| | | HYVVFGGGTKLTVLGQPKAAPSVTLFPPSSEELQANKATLVCLISDFY | |
| | | PGAVTVAWKADSSPVKAGVETTTPSKQSNNKYAASSY | |
| | Light Chain | SYVLTQPPSVSVAPGQTARITCGGDNIGSKNVHWYQQKPGQAPVLVV | 551 |
| | Variable | FDDSDRPSGIPERFSGSNSGNTATLTISRVEAGDEADYYCQVWDSSSD | |
| | Region | HYVVFGGGTKLTVL | |
| | LCDR1 | GGDNIGSKNVH | 552 |
| | LCDR2 | DDSDRPS | 553 |
| | LCDR3 | QVWDSSSDHYVV | 554 |
| | LFRW1 | SYVLTQPPSVSVAPGQTARITC | 555 |
| | LFRW2 | WYQQKPGQAPVLVVF | 556 |
| | LFRW3 | GIPERFSGSNSGNTATLTISRVEAGDEADYYC | 557 |
| | LFRW4 | FGGGTKLTVL | 558 |
| S24-1476 | Heavy Chain | EVQLVESGGGLVQPGRSLRLSCTASGFTFGDYAMSWFRQAPGKGLE | 559 |
| (Spike/ | | WVGFIRSKAYGGTTQYAASVKGRFTISRDDSKSIAYLQMNSLKTEDT | |
| RBD) | | AVYYCTRVRYCTNGVCYGYHFDYWGQGTVVTVSSAST | |
| | Heavy Chain | EVQLVESGGGLVQPGRSLRLSCTASGFTFGDYAMSWFRQAPGKGLE | 560 |
| | Variable | WVGFIRSKAYGGTTQYAASVKGRFTISRDDSKSIAYLQMNSLKTEDT | |
| | Region | AVYYCTRVRYCTNGVCYGYHFDYWGQGTVVTVSS | |
| | HCDR1 | DYAMS | 561 |
| | HCDR2 | FIRSKAYGGTTQYAASVKG | 562 |
| | HCDR3 | VRYCTNGVCYGYHFDY | 563 |
| | HFRW1 | EVQLVESGGGLVQPGRSLRLSCTASGFTFG | 564 |
| | HFRW2 | WFRQAPGKGLEWVG | 565 |
| | HFRW3 | RFTISRDDSKSIAYLQMNSLKTEDTAVYYCTR | 566 |
| | HFRW4 | WGQGTVVTVSS | 567 |
| | Light Chain | EIVMTQSPATLSVSPGERATLSCRASQSVSSNLAWYQQKPGQAPRLLI | 568 |
| | | YGASTRATGIPARFSGSGSGTEFTLTISSLQSEDFAVYYCQQYNNWWT | |
| | | FGQGTKVEIKRTVAAPSVFIFPPSDEQLKSGTASVVCLLNNFYPREAK | |
| | | VQWKVDN | |
| | Light Chain | EIVMTQSPATLSVSPGERATLSCRASQSVSSNLAWYQQKPGQAPRLLI | 569 |
| | Variable | YGASTRATGIPARFSGSGSGTEFTLTISSLQSEDFAVYYCQQYNNWWT | |
| | Region | FGQGTKVEIK | |
| | LCDR1 | RASQSVSSNLA | 570 |
| | LCDR2 | GASTRAT | 571 |
| | LCDR3 | QQYNNWWT | 572 |
| | LFRW1 | EIVMTQSPATLSVSPGERATLSC | 573 |
| | LFRW2 | WYQQKPGQAPRLLIY | 574 |
| | LFRW3 | GIPARFSGSGSGTEFTLTISSLQSEDFAVYYC | 575 |
| | LFRW4 | FGQGTKVEIK | 576 |
| S24-1564 | Heavy Chain | QVQLQESGPGLVKPSETLSLTCTVSGGSISSYYWSWIRQPPGKGLEWI | 577 |
| (NP) | | GYVYYSGNTKYNPSLKSRVTISVDTSKNQFSLKLGSVTAADTAVYYC | |
| | | ARHSRIEVAGTLDFDYWGQGTLVTVSSASTKGPSVFPLAPSSKSTSGG | |
| | | TAALGCLVKDYFPEPVTVSWNSGALTSGVHTFPAVLQSSG | |
| | Heavy Chain | QVQLQESGPGLVKPSETLSLTCTVSGGSISSYYWSWIRQPPGKGLEWI | 578 |
| | Variable | GYVYYSGNTKYNPSLKSRVTISVDTSKNQFSLKLGSVTAADTAVYYC | |
| | Region | ARHSRIEVAGTLDFDYWGQGTLVTVSS | |
| | HCDR1 | SYYWS | 579 |
| | HCDR2 | YVYYSGNTKYNPSLKS | 580 |
| | HCDR3 | HSRIEVAGTLDFDY | 581 |
| | HFRW1 | QVQLQESGPGLVKPSETLSLTCTVSGGSIS | 582 |
| | HFRW2 | WIRQPPGKGLEWIG | 583 |
| | HFRW3 | RVTISVDTSKNQFSLKLGSVTAADTAVYYCAR | 584 |
| | HFRW4 | WGQGTLVTVSS | 585 |
| | Light Chain | DIQMTQSPSSLSASVGDRVTITCRASQSIRSYLNWYQQKRGKAPKLLI | 586 |
| | | YAASSLQSGVPSRFSGSGSGTDFTLTISSLQPEDFATYYCQQSYSTPPT | |
| | | FGQGTKVEIKRTVAAPSVFIFPPSDEQLKSGTASVVCLLNNFYPREAK | |
| | | VQWKVDN | |
| | Light Chain | DIQMTQSPSSLSASVGDRVTITCRASQSIRSYLNWYQQKRGKAPKLLI | 587 |
| | Variable | YAASSLQSGVPSRFSGSGSGTDFTLTISSLQPEDFATYYCQQSYSTPPT | |
| | Region | FGQGTKVEIK | |
| | LCDR1 | RASQSIRSYLN | 588 |
| | LCDR2 | AASSLQS | 589 |
| | LCDR3 | QQSYSTPPT | 590 |
| | LFRW1 | DIQMTQSPSSLSASVGDRVTITC | 591 |
| | LFRW2 | WYQQKRGKAPKLLIY | 592 |
| | LFRW3 | GVPSRFSGSGSGTDFTLTISSLQPEDFATYYC | 593 |
| | LFRW4 | FGQGTKVEIK | 594 |
| S24-1636 | Heavy Chain | QVQLVESGGGVVQPGRSLRLSCAASGFTFSNYGMHWVRQAPGKGLE | 595 |
| (NP) | | WVAVIWYDGSNKYYADSVKGRFTISRDNSKNTLYLQMNSLRAEDTA | |
| | | VYYCARGDCTNGVCHPLLIYYDSSGLDYWGQGTLVTVSSASTKGPS | |
| | | VFPLAPSSKSTSGGTAALGCLVKDYFPEPVTVSWNSGALTSGVHTFPA | |
| | | VLQSSG | |
| | Heavy Chain | QVQLVESGGGVVQPGRSLRLSCAASGFTFSNYGMHWVRQAPGKGLE | 596 |
| | Variable | WVAVIWYDGSNKYYADSVKGRFTISRDNSKNTLYLQMNSLRAEDTA | |
| | Region | VYYCARGDCTNGVCHPLLIYYDSSGLDYWGQGTLVTVSS | |
| | HCDR1 | NYGMH | 597 |
| | HCDR2 | VIWYDGSNKYYADSVKG | 598 |
| | HCDR3 | GDCTNGVCHPLLIYYDSSGLDY | 599 |
| | HFRW1 | QVQLVESGGGVVQPGRSLRLSCAASGFTFS | 600 |
| | HFRW2 | WVRQAPGKGLEWVA | 601 |
| | HFRW3 | RFTISRDNSKNTLYLQMNSLRAEDTAVYYCAR | 602 |
| | HFRW4 | WGQGTLVTVSS | 603 |
| | Light Chain | EIVLTQSPATLSLSPGERATLSCRASQSVSSYLAWYQQKPGQAPRLLIY | 604 |
| | | DASNRATGIPARFSGSGSGTDFTLTISSLEPEDFAVYYCQQRSNWPPIT | |
| | | FGPGTKVDIKRTVAAPSVFIFPPSDEQLKSGTASVVCLLNNFYPREAK | |
| | | VQWKVDNALQSGNSQESVTEQDSKDSTYSL | |
| | Light Chain | EIVLTQSPATLSLSPGERATLSCRASQSVSSYLAWYQQKPGQAPRLLIY | 605 |
| | Variable | DASNRATGIPARFSGSGSGTDFTLTISSLEPEDFAVYYCQQRSNWPPIT | |
| | Region | FGPGTKVDIK | |
| | LCDR1 | RASQSVSSYLA | 606 |
| | LCDR2 | DASNRAT | 607 |
| | LCDR3 | QQRSNWPPIT | 608 |
| | LFRW1 | EIVLTQSPATLSLSPGERATLSC | 609 |
| | LFRW2 | WYQQKPGQAPRLLIY | 610 |
| | LFRW3 | GIPARFSGSGSGTDFTLTISSLEPEDFAVYYC | 611 |
| | LFRW4 | FGPGTKVDIK | 612 |
| S24-1002 | Heavy Chain | QVQLVESGGGVVQPGRSLRLSCAASGFTFTSYAMHWVRQAPGKGLE | 613 |
| (Spike/ | | WVAVISYDGGSKYYADSVKGRFTISRDNSKNTLYLQMNSLRAEDTA | |
| RBD) | | VYYCARTTPGITAAGTGTLGRYYYYGMDVWGQGTTVTVSSGSASAP | |
| | | TLFPLVSCENSPSDTSSV | |
| | Heavy Chain | QVQLVESGGGVVQPGRSLRLSCAASGFTFTSYAMHWVRQAPGKGLE | 614 |
| | Variable | WVAVISYDGGSKYYADSVKGRFTISRDNSKNTLYLQMNSLRAEDTA | |
| | Region | VYYCARTTPGITAAGTGTLGRYYYYGMDVWGQGTTVTVSS | |
| | HCDR1 | SYAMH | 615 |
| | HCDR2 | VISYDGGSKYYADSVKG | 616 |
| | HCDR3 | TTPGITAAGTGTLGRYYYYGMDV | 617 |
| | HFRW1 | QVQLVESGGGVVQPGRSLRLSCAASGFTFT | 618 |
| | HFRW2 | WVRQAPGKGLEWVA | 619 |
| | HFRW3 | RFTISRDNSKNTLYLQMNSLRAEDTAVYYCAR | 620 |
| | HFRW4 | WGQGTTVTVSS | 621 |
| | Light Chain | AIQLTQSPSSLSASVGDRVTITCRASQGISSALAWYQQTPGKAPKLLIY | 622 |
| | | DASSLESGVPSRFSGSGSGTDFSLTIGSLQPEDFASYYCQQFNSYPLTF | |
| | | GGGTKVEIKRTVAAPSVFIFPPSDEQLKSGTASVVCLLNNFYPREAKV | |
| | | QWKVDNALQSGNSQESVTEQDSKDSTYSLSSTLTLSKADYE | |
| | Light Chain | AIQLTQSPSSLSASVGDRVTITCRASQGISSALAWYQQTPGKAPKLLIY | 623 |
| | Variable | DASSLESGVPSRFSGSGSGTDFSLTIGSLQPEDFASYYCQQFNSYPLTF | |
| | Region | GGGTKVEIK | |
| | LCDR1 | RASQGISSALA | 624 |
| | LCDR2 | DASSLES | 625 |
| | LCDR3 | QQFNSYPLT | 626 |
| | LFRW1 | AIQLTQSPSSLSASVGDRVTITC | 627 |
| | LFRW2 | WYQQTPGKAPKLLIY | 628 |
| | LFRW3 | GVPSRFSGSGSGTDFSLTIGSLQPEDFASYYC | 629 |
| | LFRW4 | FGGGTKVEIK | 630 |
| S24-1301 | Heavy Chain | QVQLVQSGAEVKKPGASVKVSCKVSGYTLIELSMHWVRQAPGKGLE | 631 |
| (Spike) | | WMGGFDPEDGETIYAQKFQGRVTMTEDTSTDTAYMALSSLTSEDTA | |
| | | VYYCATAYAYYYASGGYYTLDYWGQGTLVTVSSASTKGPSVFPLAP | |
| | | SSKSTSGGTAALGCLVKDYFPEPVTVSWNSGALTSGVHTFPAVLQSS | |
| | | G | |
| | Heavy Chain | QVQLVQSGAEVKKPGASVKVSCKVSGYTLIELSMHWVRQAPGKGLE | 632 |
| | Variable | WMGGFDPEDGETIYAQKFQGRVTMTEDTSTDTAYMALSSLTSEDTA | |
| | Region | VYYCATAYAYYYASGGYYTLDYWGQGTLVTVSS | |
| | HCDR1 | ELSMH | 633 |
| | HCDR2 | GFDPEDGETIYAQKFQG | 634 |
| | HCDR3 | AYAYYYASGGYYTLDY | 635 |
| | HFRW1 | QVQLVQSGAEVKKPGASVKVSCKVSGYTLI | 636 |
| | HFRW2 | WVRQAPGKGLEWMG | 637 |
| | HFRW3 | RVTMTEDTSTDTAYMALSSLTSEDTAVYYCAT | 638 |
| | HFRW4 | WGQGTLVTVSS | 639 |
| | Light Chain | QAGLTQPPSVSKGLRQTATLTCTGSSNNVGNQGAAWLQQHQGHPPK | 640 |
| | | LLSYRNNNRPSGISERFSASRSGNTASLTITGLQPEDEADYYCSAWDSS | |
| | | LSNWVFGGGTKLTVLGQPKAAPSVTLFPPSSEELQANKATLVCLISDF | |
| | | YPGAVTVAWKADSSPVKAGVETTTPSKQSNNKYAASS | |
| | Light Chain | QAGLTQPPSVSKGLRQTATLTCTGSSNNVGNQGAAWLQQHQGHPPK | 641 |
| | Variable | LLSYRNNNRPSGISERFSASRSGNTASLTITGLQPEDEADYYCSAWDSS | |
| | Region | LSNWVFGGGTKLTVL | |
| | LCDR1 | TGSSNNVGNQGAA | 642 |
| | LCDR2 | RNNNRPS | 643 |
| | LCDR3 | SAWDSSLSNWV | 644 |
| | LFRW1 | QAGLTQPPSVSKGLRQTATLTC | 645 |
| | LFRW2 | WLQQHQGHPPKLLSY | 646 |
| | LFRW3 | GISERFSASRSGNTASLTITGLQPEDEADYYC | 647 |
| | LFRW4 | FGGGTKLTVL | 648 |
| S24-223 | Heavy Chain | QITLKESGPTLVKPTQTLTLTCTFSGFSLNTSGVGVGWIRQPPGKALE | 649 |
| (Spike/ | | WLALIYWDDDKRYSPSLKSRLTITKDTSKNQVVLTMTNMDPVDTAT | |
| RBD) | | YYCAHHTIVPIFDYWGQGTLVTVSSGSASAPTLFPLVSCENSPSDTSSV | |
| | Heavy Chain | QITLKESGPTLVKPTQTLTLTCTFSGFSLNTSGVGVGWIRQPPGKALE | 650 |
| | Variable | WLALIYWDDDKRYSPSLKSRLTITKDTSKNQVVLTMTNMDPVDTAT | |
| | Region | YYCAHHTIVPIFDYWGQGTLVTVSS | |
| | HCDR1 | TSGVGVG | 651 |
| | HCDR2 | LIYWDDDKRYSPSLKS | 652 |
| | HCDR3 | HTIVPIFDY | 653 |
| | HFRW1 | QITLKESGPTLVKPTQTLTLTCTFSGFSLN | 654 |
| | HFRW2 | WIRQPPGKALEWLA | 655 |
| | HFRW3 | RLTITKDTSKNQVVLTMTNMDPVDTATYYCAH | 656 |
| | HFRW4 | WGQGTLVTVSS | 657 |
| | Light Chain | QSALTQPASVSGSPGQSITISCTGTSSDVGGYNYVSWYQQHPGKAPKL | 658 |
| | | MIYDVSNRPSGVSNRFSGSKSGNTASLTISGLQAEDEADYYCNSYTSS | |
| | | STLVVFGGGTKLTVLGQPKAAPSVTLFPPSSEELQANKATLVCLISDF | |
| | | YPGAVTVAWKADSSPVKAGVETTTPSKQSNNKYAASSYLSLT | |
| | Light Chain | QSALTQPASVSGSPGQSITISCTGTSSDVGGYNYVSWYQQHPGKAPKL | 659 |
| | Variable | MIYDVSNRPSGVSNRFSGSKSGNTASLTISGLQAEDEADYYCNSYTSS | |
| | Region | STLVVFGGGTKLTVL | |
| | LCDR1 | TGTSSDVGGYNYVS | 660 |
| | LCDR2 | DVSNRPS | 661 |
| | LCDR3 | NSYTSSSTLVV | 662 |
| | LFRW1 | QSALTQPASVSGSPGQSITISC | 663 |
| | LFRW2 | WYQQHPGKAPKLMIY | 664 |
| | LFRW3 | GVSNRFSGSKSGNTASLTISGLQAEDEADYYC | 665 |
| | LFRW4 | FGGGTKLTVL | 666 |
| S24-461 | Heavy Chain | QVQLQESGPGLVKPSETLSLTCTVSGGSISSYYWSWIRQPPGKGLEWI | 667 |
| (Spike/ | | GNIYNSGSTNYNPSLKSRLTISVDTSKNHFSLKLSSVTAADTAVYYCA | |
| RBD) | | RGGLEHDGDYVYYYGMDVWGQGTTITVSSASTKGPSVFPLAPSSKST | |
| | | SGGTAALGCLVKDYFPEPVTVSWNSGALTSGVHTFPAVLQSSG | |
| | Heavy Chain | QVQLQESGPGLVKPSETLSLTCTVSGGSISSYYWSWIRQPPGKGLEWI | 668 |
| | Variable | GNIYNSGSTNYNPSLKSRLTISVDTSKNHFSLKLSSVTAADTAVYYCA | |
| | Region | RGGLEHDGDYVYYYGMDVWGQGTTITVSS | |
| | HCDR1 | SYYWS | 669 |
| | HCDR2 | NIYNSGSTNYNPSLKS | 670 |
| | HCDR3 | GGLEHDGDYVYYYGMDV | 671 |
| | HFRW1 | QVQLQESGPGLVKPSETLSLTCTVSGGSIS | 672 |
| | HFRW2 | WIRQPPGKGLEWIG | 673 |
| | HFRW3 | RLTISVDTSKNHFSLKLSSVTAADTAVYYCAR | 674 |
| | HFRW4 | WGQGTTITVSS | 675 |
| | Light Chain | SYELTQPPSVSVSLGQMARITCSGEALPKKYAYWYQQKPGQFPILVIY | 676 |
| | | KDSERPSGIPERFSGSSSGTIVTLTISGVQAEDEADYYCLSEDSSGTWV | |
| | | FGGGTKLTVLGQPKAAPSVTLFPPSSEELQANKATLVCLISDFYPGAV | |
| | | TVAWKADSSPVKAGVETTTPSKQSNNKYAASS | |
| | Light Chain | SYELTQPPSVSVSLGQMARITCSGEALPKKYAYWYQQKPGQFPILVIY | 677 |
| | Variable | KDSERPSGIPERFSGSSSGTIVTLTISGVQAEDEADYYCLSEDSSGTWV | |
| | Region | FGGGTKLTVL | |
| | LCDR1 | SGEALPKKYAY | 678 |
| | LCDR2 | KDSERPS | 679 |
| | LCDR3 | LSEDSSGTWV | 680 |
| | LFRW1 | SYELTQPPSVSVSLGQMARITC | 681 |
| | LFRW2 | WYQQKPGQFPILVIY | 682 |
| | LFRW3 | GIPERFSGSSSGTIVTLTISGVQAEDEADYYC | 683 |
| | LFRW4 | FGGGTKLTVL | 684 |
| S24-511 | Heavy Chain | QVQLVESGGGVVQPGRSLRLSCAASGFTFSSYGMHWVRQAPGKGLE | 685 |
| (NP) | | WVAVISYDGSNKYYADSVKGRFTISRDNSKNTLYLQMNSLRAEDTA | |
| | | VYYCAKYTSTVTTNYYYGMDVWGQGTTVTVSSAPTKAPDVFPIISGC | |
| | | RHPKDNSPVVLACLITGYH | |
| | Heavy Chain | QVQLVESGGGVVQPGRSLRLSCAASGFTFSSYGMHWVRQAPGKGLE | 686 |
| | Variable | WVAVISYDGSNKYYADSVKGRFTISRDNSKNTLYLQMNSLRAEDTA | |
| | Region | VYYCAKYTSTVTTNYYYGMDVWGQGTTVTVSS | |
| | HCDR1 | SYGMH | 687 |
| | HCDR2 | VISYDGSNKYYADSVKG | 688 |
| | HCDR3 | YTSTVTTNYYYGMDV | 689 |
| | HFRW1 | QVQLVESGGGVVQPGRSLRLSCAASGFTFS | 690 |
| | HFRW2 | WVRQAPGKGLEWVA | 691 |
| | HFRW3 | RFTISRDNSKNTLYLQMNSLRAEDTAVYYCAK | 692 |
| | HFRW4 | WGQGTTVTVSS | 693 |
| | Light Chain | SYELTQPPSVSVSPGQTASITCSGDKLGDKYACWYQQKPGQSPVLVIY | 694 |
| | | QDSKRPSGIPERFSGSNSGNTATLTISGTQAMDEADYYCQAWDSSTV | |
| | | VFGGGTKLTVLGQPKAAPSVTLFPPSSEELQANKATLVCLISDFYPGA | |
| | | VTVAWKADSSPVKAGVETTTPSKQSNNKYAASSY | |
| | Light Chain | SYELTQPPSVSVSPGQTASITCSGDKLGDKYACWYQQKPGQSPVLVIY | 695 |
| | Variable | QDSKRPSGIPERFSGSNSGNTATLTISGTQAMDEADYYCQAWDSSTV | |
| | Region | VFGGGTKLTVL | |
| | LCDR1 | SGDKLGDKYAC | 696 |
| | LCDR2 | QDSKRPS | 697 |
| | LCDR3 | QAWDSSTVV | 698 |
| | LFRW1 | SYELTQPPSVSVSPGQTASITC | 699 |
| | LFRW2 | WYQQKPGQSPVLVIY | 700 |
| | LFRW3 | GIPERFSGSNSGNTATLTISGTQAMDEADYYC | 701 |
| | LFRW4 | FGGGTKLTVL | 702 |
| S24-788 | Heavy Chain | QVQLVESGGGVVQPGRSLRLSCAASGFTFSSYGMHWVRQAPGKGLE | 703 |
| (Spike/ | | WVAVIWYDGSNKYYADSVKGRFTISRDNSKNTLYLQMNSLRAEDTA | |
| RBD) | | VYYCARGRSPGGGHYYGMDVWGQGTTVTVSSGSASAPTLFPLVSCE | |
| | | NSPSDTSSV | |
| | Heavy Chain | QVQLVESGGGVVQPGRSLRLSCAASGFTFSSYGMHWVRQAPGKGLE | 704 |
| | Variable | WVAVIWYDGSNKYYADSVKGRFTISRDNSKNTLYLQMNSLRAEDTA | |
| | Region | VYYCARGRSPGGGHYYGMDVWGQGTTVTVSS | |
| | HCDR1 | SYGMH | 705 |
| | HCDR2 | VIWYDGSNKYYADSVKG | 706 |
| | HCDR3 | GRSPGGGHYYGMDV | 707 |
| | HFRW1 | QVQLVESGGGVVQPGRSLRLSCAASGFTFS | 708 |
| | HFRW2 | WVRQAPGKGLEWVA | 709 |
| | HFRW3 | RFTISRDNSKNTLYLQMNSLRAEDTAVYYCAR | 710 |
| | HFRW4 | WGQGTTVTVSS | 711 |
| | Light Chain | SYELTQPPSVSVSPGQTASITCSGDKLGDKYACWYQQKPGQSPVLVIY | 712 |
| | | QDSKRPSGIPERFSGSNSGNTATLTISGTQAMDEADYYCQAWDSSSV | |
| | | VFGGGTKLTVLGQPKAAPSVTLFPPSSEELQANKATLVCLISDFYPGA | |
| | | VTVAWKADSSPVKAGVETTTPSKQSNNKYAASS | |
| | Light Chain | SYELTQPPSVSVSPGQTASITCSGDKLGDKYACWYQQKPGQSPVLVIY | 713 |
| | Variable | QDSKRPSGIPERFSGSNSGNTATLTISGTQAMDEADYYCQAWDSSSV | |
| | Region | VFGGGTKLTVL | |
| | LCDR1 | SGDKLGDKYAC | 714 |
| | LCDR2 | QDSKRPS | 715 |
| | LCDR3 | QAWDSSSVV | 716 |
| | LFRW1 | SYELTQPPSVSVSPGQTASITC | 717 |
| | LFRW2 | WYQQKPGQSPVLVIY | 718 |
| | LFRW3 | GIPERFSGSNSGNTATLTISGTQAMDEADYYC | 719 |
| | LFRW4 | FGGGTKLTVL | 720 |
| S24-821 | Heavy Chain | QVTLRESGPALVKPTQTLTLTCTFSGLSLSSSGMCVSWIRQPPGKALE | 721 |
| (Spike/ | | WLARIDWDDDKYYSTSLKTRLTISKDTSKNQVVLTMTNMDPVDTAT | |
| RBD) | | YYCARICTMVRGLHDAFDIWGQGTMVTVSSGSASAPTLFPLVSCENS | |
| | | PSDTSSV | |
| | Heavy Chain | QVTLRESGPALVKPTQTLTLTCTFSGLSLSSSGMCVSWIRQPPGKALE | 722 |
| | Variable | WLARIDWDDDKYYSTSLKTRLTISKDTSKNQVVLTMTNMDPVDTAT | |
| | Region | YYCARICTMVRGLHDAFDIWGQGTMVTVSS | |
| | HCDR1 | SSGMCVS | 723 |
| | HCDR2 | RIDWDDDKYYSTSLKT | 724 |
| | HCDR3 | ICTMVRGLHDAFDI | 725 |
| | HFRW1 | QVTLRESGPALVKPTQTLTLTCTFSGLSLS | 726 |
| | HFRW2 | WIRQPPGKALEWLA | 727 |
| | HFRW3 | RLTISKDTSKNQVVLTMTNMDPVDTATYYCAR | 728 |
| | HFRW4 | WGQGTMVTVSS | 729 |
| | Light Chain | DIQMTQSPSTLSASVGDRVTITCRASQSISSWLAWYQQKPGKAPKLLI | 730 |
| | | YKASSLESGVPSRFSGSGSGTEFTLTISSLQPDDFATYYCQQYNSYSW | |
| | | TFGQGTKVEIKRTVAAPSVFIFPPSDEQLKSGTASVVCLLNNFYPREA | |
| | | KVQWKVDN | |
| | Light Chain | DIQMTQSPSTLSASVGDRVTITCRASQSISSWLAWYQQKPGKAPKLLI | 731 |
| | Variable | YKASSLESGVPSRFSGSGSGTEFTLTISSLQPDDFATYYCQQYNSYSW | |
| | Region | TFGQGTKVEIK | |
| | LCDR1 | RASQSISSWLA | 732 |
| | LCDR2 | KASSLES | 733 |
| | LCDR3 | QQYNSYSWT | 734 |
| | LFRW1 | DIQMTQSPSTLSASVGDRVTITC | 735 |
| | LFRW2 | WYQQKPGKAPKLLIY | 736 |
| | LFRW3 | GVPSRFSGSGSGTEFTLTISSLQPDDFATYYC | 737 |
| | LFRW4 | FGQGTKVEIK | 738 |
| S144-67 | Heavy Chain | EVQLVQSGAEVKKPGESLKISCKGSGYSFTTYWIAWVRQMPGKGLE | 739 |
| (Spike/ | | WVGIIYPDDSDTRYSPSFQGQVTISADKSIGTAYLQWSSLKASDTAMY | |
| RBD) | | YCARGQYYDFWSGAGGVDVWGQGTTVTVSSASTKGPSVFPLAPSSK | |
| | | STSGGTAALGCLVKDYFPEPVTVSWNSGALTSGVHTFPAVLQSSG | |
| | Heavy Chain | EVQLVQSGAEVKKPGESLKISCKGSGYSFTTYWIAWVRQMPGKGLE | 740 |
| | Variable | WVGIIYPDDSDTRYSPSFQGQVTISADKSIGTAYLQWSSLKASDTAMY | |
| | Region | YCARGQYYDFWSGAGGVDVWGQGTTVTVSS | |
| | HCDR1 | TYWIA | 741 |
| | HCDR2 | IIYPDDSDTRYSPSFQG | 742 |
| | HCDR3 | GQYYDFWSGAGGVDV | 743 |
| | HFRW1 | EVQLVQSGAEVKKPGESLKISCKGSGYSFT | 744 |
| | HFRW2 | WVRQMPGKGLEWVG | 745 |
| | HFRW3 | QVTISADKSIGTAYLQWSSLKASDTAMYYCAR | 746 |
| | HFRW4 | WGQGTTVTVSS | 747 |
| | Light Chain | QSVLTQPPSVSGAPGQRVTISCTGSRSNIGAGYDVQWYQQVPGTAPK | 748 |
| | | LLISGNSNRPSGVPDRFSGSKSGTSASLAITGLQAEDEADYYCQSYDSS | |
| | | LSGLRVFGGGTKLTVLGQPKAAPSVTLFPPSSEELQANKATLVCLISD | |
| | | FYPGAVTVAWKADSSPVKAGVETTTPSKQSNNKYAASSYLSLTPEQ | |
| | | WKSH | |
| | Light Chain | QSVLTQPPSVSGAPGQRVTISCTGSRSNIGAGYDVQWYQQVPGTAPK | 749 |
| | Variable | LLISGNSNRPSGVPDRFSGSKSGTSASLAITGLQAEDEADYYCQSYDSS | |
| | Region | LSGLRVFGGGTKLTVL | |
| | LCDR1 | TGSRSNIGAGYDVQ | 750 |
| | LCDR2 | GNSNRPS | 751 |
| | LCDR3 | QSYDSSLSGLRV | 752 |
| | LFRW1 | QSVLTQPPSVSGAPGQRVTISC | 753 |
| | LFRW2 | WYQQVPGTAPKLLIS | 754 |
| | LFRW3 | GVPDRFSGSKSGTSASLAITGLQAEDEADYYC | 755 |
| | LFRW4 | FGGGTKLTVL | 756 |
| S144-69 | Heavy Chain | EVQLVQSGAEVKKPGESLKISCKGSGYSFTSYWIGWVRQMPGKGLE | 757 |
| (Spike/ | | WMGIIYPGDSDTRYSPSFQGQVTISADKSITTAYLQWSSLKASDTAMY | |
| RBD) | | YCARTQTTNWFDSWGQGTLVTVSSASTKGPSVFPLAPSSKSTSGGTA | |
| | | ALGCLVKDYFPEPVTVSWNSGALTSGVHTFPAVLQSSG | |
| | Heavy Chain | EVQLVQSGAEVKKPGESLKISCKGSGYSFTSYWIGWVRQMPGKGLE | 758 |
| | Variable | WMGIIYPGDSDTRYSPSFQGQVTISADKSITTAYLQWSSLKASDTAMY | |
| | Region | YCARTQTTNWFDSWGQGTLVTVSS | |
| | HCDR1 | SYWIG | 759 |
| | HCDR2 | IIYPGDSDTRYSPSFQG | 760 |
| | HCDR3 | TQTTNWFDS | 761 |
| | HFRW1 | EVQLVQSGAEVKKPGESLKISCKGSGYSFT | 762 |
| | HFRW2 | WVRQMPGKGLEWMG | 763 |
| | HFRW3 | QVTISADKSITTAYLQWSSLKASDTAMYYCAR | 764 |
| | HFRW4 | WGQGTLVTVSS | 765 |
| | Light Chain | DIQMTQSPSTLSVSVGDRVTITCRASQSVSSWLAWYQQKPGKAPKLLI | 766 |
| | | YDASSLESGVPSRFSGSGSGTEFTLTISSLQPDDFATYYCQQYNSFYTF | |
| | | GQGTKLEIKRTVAAPSVFIFPPSDEQLKSGTASVVCLLNNFYPREAKV | |
| | | QWKVDNALQSGNSQESVTEQDSKDSTYSLSSTLTLSKADYE | |
| | Light Chain | DIQMTQSPSTLSVSVGDRVTITCRASQSVSSWLAWYQQKPGKAPKLLI | 767 |
| | Variable | YDASSLESGVPSRFSGSGSGTEFTLTISSLQPDDFATYYCQQYNSFYTF | |
| | Region | GQGTKLEIK | |
| | LCDR1 | RASQSVSSWLA | 768 |
| | LCDR2 | DASSLES | 769 |
| | LCDR3 | QQYNSFYT | 770 |
| | LFRW1 | DIQMTQSPSTLSVSVGDRVTITC | 771 |
| | LFRW2 | WYQQKPGKAPKLLIY | 772 |
| | LFRW3 | GVPSRFSGSGSGTEFTLTISSLQPDDFATYYC | 773 |
| | LFRW4 | FGQGTKLEIK | 774 |
| S144-94 | Heavy Chain | QVQLVESGGGVVQPGGSLRLSCAASGFTFSSYGMHWVRQAPGKGLE | 775 |
| (ORF8) | | WVTFTRYDGSNKFYADSVKGRFSISRDNSKNTLYLQMNSLRAEDTA | |
| | | VYYCAKESRVAFGGAIAIYYFGMDVWGQGTTVTVSSASTKGPSVFPL | |
| | | APCSRSTSGGTAALGCLVKDYFPEPVTVSWNSGALTSGVHTFPAVLQ | |
| | | SSG | |
| | Heavy Chain | QVQLVESGGGVVQPGGSLRLSCAASGFTFSSYGMHWVRQAPGKGLE | 776 |
| | Variable | WVTFTRYDGSNKFYADSVKGRFSISRDNSKNTLYLQMNSLRAEDTA | |
| | Region | VYYCAKESRVAFGGAIAIYYFGMDVWGQGTTVTVSS | |
| | HCDR1 | SYGMH | 777 |
| | HCDR2 | FTRYDGSNKFYADSVKG | 778 |
| | HCDR3 | ESRVAFGGAIAIYYFGMDV | 779 |
| | HFRW1 | QVQLVESGGGVVQPGGSLRLSCAASGFTFS | 780 |
| | HFRW2 | WVRQAPGKGLEWVT | 781 |
| | HFRW3 | RFSISRDNSKNTLYLQMNSLRAEDTAVYYCAK | 782 |
| | HFRW4 | WGQGTTVTVSS | 783 |
| | Light Chain | DIVMTQSPLSLPVTPGEPASISCRSSQSLLHSNGYNYLDWYLQKPGQS | 784 |
| | | PQLLIYLGSNRASGVPDRFSGSGSGTDFTLKISRVEAEDVGVYYCMQA | |
| | | LQTPQYTFGQGTKLEIKRTVAAPSVFIFPPSDEQLKSGTASVVCLLNNF | |
| | | YPREAKVQWKVDNALQSGNSQESVTEQDSKDSTYSLSSTLTLSKADY | |
| | | E | |
| | Light Chain | DIVMTQSPLSLPVTPGEPASISCRSSQSLLHSNGYNYLDWYLQKPGQS | 785 |
| | Variable | PQLLIYLGSNRASGVPDRFSGSGSGTDFTLKISRVEAEDVGVYYCMQA | |
| | Region | LQTPQYTFGQGTKLEIK | |
| | LCDR1 | RSSQSLLHSNGYNYLD | 786 |
| | LCDR2 | LGSNRAS | 787 |
| | LCDR3 | MQALQTPQYT | 788 |
| | LFRW1 | DIVMTQSPLSLPVTPGEPASISC | 789 |
| | LFRW2 | WYLQKPGQSPQLLIY | 790 |
| | LFRW3 | GVPDRFSGSGSGTDFTLKISRVEAEDVGVYYC | 791 |
| | LFRW4 | FGQGTKLEIK | 792 |
| S144-113 | Heavy Chain | EVQLLESGGGLVQPGGSLRLSCAASGFTFSNYAMSWVRQAPGKGLE | 793 |
| (ORF8) | | WVSAIRNSGSSTYYADSVKGRFTISRDNSKNTLYLQMNSLRAEDSAV | |
| | | YYCAKVGGTAAGHPFYDYWGQGTLVTVSSASTKGPSVFPLAPSSKST | |
| | | SGGTAALGCLVKDYFPEPVTVSWNSGALTSGVHTFPAVLQSSGL | |
| | Heavy Chain | EVQLLESGGGLVQPGGSLRLSCAASGFTFSNYAMSWVRQAPGKGLE | 794 |
| | Variable | WVSAIRNSGSSTYYADSVKGRFTISRDNSKNTLYLQMNSLRAEDSAV | |
| | Region | YYCAKVGGTAAGHPFYDYWGQGTLVTVSS | |
| | HCDR1 | NYAMS | 795 |
| | HCDR2 | AIRNSGSSTYYADSVKG | 796 |
| | HCDR3 | VGGTAAGHPFYDY | 797 |
| | HFRW1 | EVQLLESGGGLVQPGGSLRLSCAASGFTFS | 798 |
| | HFRW2 | WVRQAPGKGLEWVS | 799 |
| | HFRW3 | RFTISRDNSKNTLYLQMNSLRAEDSAVYYCAK | 800 |
| | HFRW4 | WGQGTLVTVSS | 801 |
| | Light Chain | DIQMTQSPSSLSASVGDRVTITCRASQSISNYLNWYQQKPGKAPDLLI | 802 |
| | | YAASSLQSGVPLRFSGSGSGTDFTLTISSLQPEDFATYYCQQTYSAPTF | |
| | | GGGTKVEIKRTVAAPSVFIFPPSDEQLKSGTASVVCLLNNFYPREAKV | |
| | | QWKVDNALQSGNSQESVTEQDSKDSTYSLSSTLTLSKADYE | |
| | Light Chain | DIQMTQSPSSLSASVGDRVTITCRASQSISNYLNWYQQKPGKAPDLLI | 803 |
| | Variable | YAASSLQSGVPLRFSGSGSGTDFTLTISSLQPEDFATYYCQQTYSAPTF | |
| | Region | GGGTKVEIK | |
| | LCDR1 | RASQSISNYLN | 804 |
| | LCDR2 | AASSLQS | 805 |
| | LCDR3 | QQTYSAPT | 806 |
| | LFRW1 | DIQMTQSPSSLSASVGDRVTITC | 807 |
| | LFRW2 | WYQQKPGKAPDLLIY | 808 |
| | LFRW3 | GVPLRFSGSGSGTDFTLTISSLQPEDFATYYC | 809 |
| | LFRW4 | FGGGTKVEIK | 810 |
| S144-175 | Heavy Chain | QVQLVQSGAEVKKPGASVKVSCKASGYTFTGYYMHWVRQAPGQGL | 811 |
| (ORF8) | | EWMGRINPNSGGTNFAQRFQGRVSMTRDTSISTAYMELSSLRSDDTA | |
| | | VYYCARGAKFEHLPFDIWGQGTMVTVSSASTKGPSVFPLAPSSKSTSG | |
| | | GTAALGCLVKDYFPEPVTVSWNSGALTSGVHTFPAVLQSSG | |
| | Heavy Chain | QVQLVQSGAEVKKPGASVKVSCKASGYTFTGYYMHWVRQAPGQGL | 812 |
| | Variable | EWMGRINPNSGGTNFAQRFQGRVSMTRDTSISTAYMELSSLRSDDTA | |
| | Region | VYYCARGAKFEHLPFDIWGQGTMVTVSS | |
| | HCDR1 | GYYMH | 813 |
| | HCDR2 | RINPNSGGTNFAQRFQG | 814 |
| | HCDR3 | GAKFEHLPFDI | 815 |
| | HFRW1 | QVQLVQSGAEVKKPGASVKVSCKASGYTFT | 816 |
| | HFRW2 | WVRQAPGQGLEWMG | 817 |
| | HFRW3 | RVSMTRDTSISTAYMELSSLRSDDTAVYYCAR | 818 |
| | HFRW4 | WGQGTMVTVSS | 819 |
| | Light Chain | QSMLTQPPSASGTPGQRVTISCSGSSSNIGSNYVYWYQQLPGTAPKLLI | 820 |
| | | YRNNQRPSGVPDRFSGSKSGTSASLAISGLRSEDEADYYCAAWDDRR | |
| | | WVFGGGTKLTVLGQPKAAPSVTLFPPSSEELQANKATLVCLISDFYPG | |
| | | AVTVAWKADSSPVKAGVETTTPSKQSNNKYAASS | |
| | Light Chain | QSMLTQPPSASGTPGQRVTISCSGSSSNIGSNYVYWYQQLPGTAPKLLI | 821 |
| | Variable | YRNNQRPSGVPDRFSGSKSGTSASLAISGLRSEDEADYYCAAWDDRR | |
| | Region | WVFGGGTKLTVL | |
| | LCDR1 | SGSSSNIGSNYVY | 822 |
| | LCDR2 | RNNQRPS | 823 |
| | LCDR3 | AAWDDRRWV | 824 |
| | LFRW1 | QSMLTQPPSASGTPGQRVTISC | 825 |
| | LFRW2 | WYQQLPGTAPKLLIY | 826 |
| | LFRW3 | GVPDRFSGSKSGTSASLAISGLRSEDEADYYC | 827 |
| | LFRW4 | FGGGTKLTVL | 828 |
| S144-208 | Heavy Chain | QVQLVQSGAEVKKPGASVKVSCKSSGYTFTGYYMHWVRQAPGQGL | 829 |
| (ORF8) | | EWMGRINPNSGGTNYAQKFQGRVTMTRDTSISTAYMELSRLRSDDT | |
| | | AVYYCARGARGGAGCSGWSCFDFWGQGTLVTVSSASTKGPSVFPLA | |
| | | PSSKSTSGGTAALGCLVKDYFPEPVTVSWNSGALTSGVHTFPAVLQSS | |
| | | G | |
| | Heavy Chain | QVQLVQSGAEVKKPGASVKVSCKSSGYTFTGYYMHWVRQAPGQGL | 830 |
| | Variable | EWMGRINPNSGGTNYAQKFQGRVTMTRDTSISTAYMELSRLRSDDT | |
| | Region | AVYYCARGARGGAGCSGWSCFDFWGQGTLVTVSS | |
| | HCDR1 | GYYMH | 831 |
| | HCDR2 | RINPNSGGTNYAQKFQG | 832 |
| | HCDR3 | GARGGAGCSGWSCFDF | 833 |
| | HFRW1 | QVQLVQSGAEVKKPGASVKVSCKSSGYTFT | 834 |
| | HFRW2 | WVRQAPGQGLEWMG | 835 |
| | HFRW3 | RVTMTRDTSISTAYMELSRLRSDDTAVYYCAR | 836 |
| | HFRW4 | WGQGTLVTVSS | 837 |
| | Light Chain | QSALTQPRSVSGSPGQSVTISCTGTSSDVGGYKYVSWYQQHPGKAPK | 838 |
| | | LMIYDVSKRPSGVPDRFSGSKSGNTASLTISGLQAEDEGDYYCCSYAG | |
| | | TYSLVFGGGTKVTVTVLGQPKAAPSVTLFPPSSEELQANKATLVCLIS | |
| | | DFYPGAVTVAWKADSSPVKAGVETTTPSKQSNNKYAASSYLSLTPEQ | |
| | | WKSH | |
| | Light Chain | QSALTQPRSVSGSPGQSVTISCTGTSSDVGGYKYVSWYQQHPGKAPK | 839 |
| | Variable | LMIYDVSKRPSGVPDRFSGSKSGNTASLTISGLQAEDEGDYYCCSYAG | |
| | Region | TYSLVFGGGTKVTV | |
| | LCDR1 | TGTSSDVGGYKYVS | 840 |
| | LCDR2 | DVSKRPS | 841 |
| | LCDR3 | CSYAGTYSLV | 842 |
| | LFRW1 | QSALTQPRSVSGSPGQSVTISC | 843 |
| | LFRW2 | WYQQHPGKAPKLMIY | 844 |
| | LFRW3 | GVPDRFSGSKSGNTASLTISGLQAEDEGDYYC | 845 |
| | LFRW4 | FGGGTKVTV | 846 |
| S144-339 | Heavy Chain | EVQLVESGGGLVKPGGSLRLSCAASGFTFSDYTMNWVRQAPGKGLE | |
| (NP) | | WVSSITRSSTYIYYADSVKGRFTISRDNAKNSLYLQMNSLRAEDTAVY | |
| | | YCARDPYYDILTGYWNYWGQGTLVTVSSASTKGPSVFPLAPSSKSTS | |
| | | GGTAALGCLVKDYFPEPVTVSWNSGALTSGVHTFPAVLQSSG | 847 |
| | Heavy Chain | EVQLVESGGGLVKPGGSLRLSCAASGFTFSDYTMNWVRQAPGKGLE | 848 |
| | Variable | WVSSITRSSTYIYYADSVKGRFTISRDNAKNSLYLQMNSLRAEDTAVY | |
| | Region | YCARDPYYDILTGYWNYWGQGTLVTVSS | |
| | HCDR1 | DYTMN | 849 |
| | HCDR2 | SITRSSTYIYYADSVKG | 850 |
| | HCDR3 | DPYYDILTGYWNY | 851 |
| | HFRW1 | EVQLVESGGGLVKPGGSLRLSCAASGFTFS | 852 |
| | HFRW2 | WVRQAPGKGLEWVS | 853 |
| | HFRW3 | RFTISRDNAKNSLYLQMNSLRAEDTAVYYCAR | 854 |
| | HFRW4 | WGQGTLVTVSS | 855 |
| | Light Chain | EIVLTQSPGTLSLSPGERATLSCRASQSLSSSYLAWYQQKPGQSPRLLI | 856 |
| | | YGASSRATGIPDRFSGSGSGTDFTLTINRLEPEDFAVYYCQQYRTSPRG | |
| | | TFGGGTKVEIKRTVAAPSVFIFPPSDEQLKSGTASVVCLLNNFYPREA | |
| | | KVQWKVDNALQSGNSQESVTEQDSKDSTYSLSSTLTLSKADYE | |
| | Light Chain | EIVLTQSPGTLSLSPGERATLSCRASQSLSSSYLAWYQQKPGQSPRLLI | 857 |
| | Variable | YGASSRATGIPDRFSGSGSGTDFTLTINRLEPEDFAVYYCQQYRTSPRG | |
| | Region | TFGGGTKVEIK | |
| | LCDR1 | RASQSLSSSYLA | 858 |
| | LCDR2 | GASSRAT | 859 |
| | LCDR3 | QQYRTSPRGT | 860 |
| | LFRW1 | EIVLTQSPGTLSLSPGERATLSC | 861 |
| | LFRW2 | WYQQKPGQSPRLLIY | 862 |
| | LFRW3 | GIPDRFSGSGSGTDFTLTINRLEPEDFAVYYC | 863 |
| | LFRW4 | FGGGTKVEIK | 864 |
| S144-359 | Heavy Chain | EVQLVESGGGLVQPGGSLRLSCAASGFTFSSYAMSWVRQAPGKGLE | 865 |
| (ORF8) | | WVSSIRGSGGSTYYADSVKGRFTISRDNSKYTLYLQMNSLRAEDTAV | |
| | | YYCAKITGAVGGENWFDPWGQGTLVTVSSASTKGPSVFPLAPCSRST | |
| | | SGGTAALGCLVKDYFPEPVTVSWNSGALTSGVHTFPAVLQSSG | |
| | Heavy Chain | EVQLVESGGGLVQPGGSLRLSCAASGFTFSSYAMSWVRQAPGKGLE | 866 |
| | Variable | WVSSIRGSGGSTYYADSVKGRFTISRDNSKYTLYLQMNSLRAEDTAV | |
| | Region | YYCAKITGAVGGENWFDPWGQGTLVTVSS | |
| | HCDR1 | SYAMS | 867 |
| | HCDR2 | SIRGSGGSTYYADSVKG | 868 |
| | HCDR3 | ITGAVGGENWFDP | 869 |
| | HFRW1 | EVQLVESGGGLVQPGGSLRLSCAASGFTFS | 870 |
| | HFRW2 | WVRQAPGKGLEWVS | 871 |
| | HFRW3 | RFTISRDNSKYTLYLQMNSLRAEDTAVYYCAK | 872 |
| | HFRW4 | WGQGTLVTVSS | 873 |
| | Light Chain | DIQMTQSPSSLSASVGDRVTITCRASQSISSYLNWYQQKPGKAPKLLIY | 874 |
| | | AASSLQSGVPSRFSGSGSGTDFTLTISSLQPEDFAIYYCQQTSRTPLTFG | |
| | | GGTKVEVKRTVAAPSVFIFPPSDEQLKSGTASVVCLLNNFYPREAKVQ | |
| | | WKVDNALQSGNSQESVTEQDSKDSTYSLSSTLTLSKADYE | |
| | Light Chain | DIQMTQSPSSLSASVGDRVTITCRASQSISSYLNWYQQKPGKAPKLLIY | 875 |
| | Variable | AASSLQSGVPSRFSGSGSGTDFTLTISSLQPEDFAIYYCQQTSRTPLTFG | |
| | Region | GGTKVEVK | |
| | LCDR1 | RASQSISSYLN | 876 |
| | LCDR2 | AASSLQS | 877 |
| | LCDR3 | QQTSRTPLT | 878 |
| | LFRW1 | DIQMTQSPSSLSASVGDRVTITC | 879 |
| | LFRW2 | WYQQKPGKAPKLLIY | 880 |
| | LFRW3 | GVPSRFSGSGSGTDFTLTISSLQPEDFAIYYC | 881 |
| | LFRW4 | FGGGTKVEVK | 882 |
| S144-460 | Heavy Chain | EVRLVQSGGGLVKPGGSLRLSCAASGFTFSTAWVRWVRQAPGKGLE | 883 |
| (Spike/ | | CVGRIKSKNDGDRAEYAAPARGRFIISRDDAENILYLQMNNLKTEDT | |
| RBD) | | AFYYCTTDQGNSSAFYSADYWGQGTLVTVSSASPTSPKVFPLSLDSTP | |
| | | QDGNVVVACLVQGFFPQEPLSVTWSESGQNVTARNF | |
| | Heavy Chain | EVRLVQSGGGLVKPGGSLRLSCAASGFTFSTAWVRWVRQAPGKGLE | 884 |
| | Variable | CVGRIKSKNDGDRAEYAAPARGRFIISRDDAENILYLQMNNLKTEDT | |
| | Region | AFYYCTTDQGNSSAFYSADYWGQGTLVTVSS | |
| | HCDR1 | TAWVR | 885 |
| | HCDR2 | RIKSKNDGDRAEYAAPARG | 886 |
| | HCDR3 | DQGNSSAFYSADY | 887 |
| | HFRW1 | EVRLVQSGGGLVKPGGSLRLSCAASGFTFS | 888 |
| | HFRW2 | WVRQAPGKGLECVG | 889 |
| | HFRW3 | RFIISRDDAENILYLQMNNLKTEDTAFYYCTT | 890 |
| | HFRW4 | WGQGTLVTVSS | 891 |
| | Light Chain | DIQMTQSPSAMSASVGDRVTITCRASQDINTFLTWFQQKPGKVPQRLI | 892 |
| | | FAAYRLQSGVPSRFSGSGSGTEFTLTINSLQPEDVATYYCLHHKTYPY | |
| | | TFGQGTKLEIKRTVAAPSVFIFPPSDEQLKSGTASVVCLLNNFYPREAK | |
| | | VQWKVDNALQSGNSQESVTEQDSKDSTYSLSSTLTLSKADYE | |
| | Light Chain | DIQMTQSPSAMSASVGDRVTITCRASQDINTFLTWFQQKPGKVPQRLI | 893 |
| | Variable | FAAYRLQSGVPSRFSGSGSGTEFTLTINSLQPEDVATYYCLHHKTYPY | |
| | Region | TFGQGTKLEIK | |
| | LCDR1 | RASQDINTFLT | 894 |
| | LCDR2 | AAYRLQS | 895 |
| | LCDR3 | LHHKTYPYT | 896 |
| | LFRW1 | DIQMTQSPSAMSASVGDRVTITC | 897 |
| | LFRW2 | WFQQKPGKVPQRLIF | 898 |
| | LFRW3 | GVPSRFSGSGSGTEFTLTINSLQPEDVATYYC | 899 |
| | LFRW4 | FGQGTKLEIK | 900 |
| S144-466 | Heavy Chain | EVQLVQSGAEVKKPGESLKISCKGSGYRFTRYWIGWVRQMPGKGLE | 901 |
| (Spike/ | | WMGIIYLGDSETRYSPSFQGQVTISADNSISTAYLQWSSLKASDTAMY | |
| RBD) | | YCARSSNWNYGDYWGQGTLVTVSSASTKGPSVFPLAPCSRSTSGGTA | |
| | | ALGCLVKDYFPEPVTVSWNSGALTSGVHTFPAVLQSSG | |
| | Heavy Chain | EVQLVQSGAEVKKPGESLKISCKGSGYRFTRYWIGWVRQMPGKGLE | 902 |
| | Variable | WMGIIYLGDSETRYSPSFQGQVTISADNSISTAYLQWSSLKASDTAMY | |
| | Region | YCARSSNWNYGDYWGQGTLVTVSS | |
| | HCDR1 | RYWIG | 903 |
| | HCDR2 | IIYLGDSETRYSPSFQG | 904 |
| | HCDR3 | SSNWNYGDY | 905 |
| | HFRW1 | EVQLVQSGAEVKKPGESLKISCKGSGYRFT | 906 |
| | HFRW2 | WVRQMPGKGLEWMG | 907 |
| | HFRW3 | QVTISADNSISTAYLQWSSLKASDTAMYYCAR | 908 |
| | HFRW4 | WGQGTLVTVSS | 909 |
| | Light Chain | DIQMTQSPSTLSASVGDRVTITCRASQSITSWLAWYQQKSGKAPKLLI | 910 |
| | | YDASSLESGVPSRFSGSGSGTEFTLTISSLQPDDFATYYCQQYNSYPW | |
| | | TFGQGTKVEIKRTVAAPSVFIFPPSDEQLKSGTASVVCLLNNFYPREA | |
| | | KVQWKVDNALQSGNSQESVTEQDSKDSTYSLSSTLTLSKADYE | |
| | Light Chain | DIQMTQSPSTLSASVGDRVTITCRASQSITSWLAWYQQKSGKAPKLLI | 911 |
| | Variable | YDASSLESGVPSRFSGSGSGTEFTLTISSLQPDDFATYYCQQYNSYPW | |
| | Region | TFGQGTKVEIK | |
| | LCDR1 | RASQSITSWLA | 912 |
| | LCDR2 | DASSLES | 913 |
| | LCDR3 | QQYNSYPWT | 914 |
| | LFRW1 | DIQMTQSPSTLSASVGDRVTITC | 915 |
| | LFRW2 | WYQQKSGKAPKLLIY | 916 |
| | LFRW3 | GVPSRFSGSGSGTEFTLTISSLQPDDFATYYC | 917 |
| | LFRW4 | FGQGTKVEIK | 918 |
| S144-469 | Heavy Chain | QVQLQESGPGLVKPSETLSLTCTVSGGSISSDYWSWIRQPPGKGLEWI | 919 |
| (ORF8) | | GYMYYSGSTNYNPSLKSRVTISVDTSKNQFSLKLSSVTAADTAVYYC | |
| | | ARWDRGSRPHYYYYGMDVWGQGTTVTVSSASTKGPSVFPLAPSSKS | |
| | | TSGGTAALGCLVKDYFPEPVTVSWNSGALTSGVHTFPAVLQSSG | |
| | Heavy Chain | QVQLQESGPGLVKPSETLSLTCTVSGGSISSDYWSWIRQPPGKGLEWI | 920 |
| | Variable | GYMYYSGSTNYNPSLKSRVTISVDTSKNQFSLKLSSVTAADTAVYYC | |
| | Region | ARWDRGSRPHYYYYGMDVWGQGTTVTVSS | |
| | HCDR1 | SDYWS | 921 |
| | HCDR2 | YMYYSGSTNYNPSLKS | 922 |
| | HCDR3 | WDRGSRPHYYYYGMDV | 923 |
| | HFRW1 | QVQLQESGPGLVKPSETLSLTCTVSGGSIS | 924 |
| | HFRW2 | WIRQPPGKGLEWIG | 925 |
| | HFRW3 | RVTISVDTSKNQFSLKLSSVTAADTAVYYCAR | 926 |
| | HFRW4 | WGQGTTVTVSS | 927 |
| | Light Chain | DIVMTQSPLSLPVTPGEPASISCRSSQSLLHSNGYNYLDWYLQKPGQS | 928 |
| | | PQLLIYLGSNRASGVPDRFSGSASGTDFTLKISRVEAEDVGVYYCMQA | |
| | | LQAFTFGPGTKVDIKRTVAAPSVFIFPPSDEQLKSGTASVVCLLNNFYP | |
| | | REAKVQWKVDNALQSGNSQESVTEQDSKDSTYSLSSTLTLSKADYE | |
| | Light Chain | DIVMTQSPLSLPVTPGEPASISCRSSQSLLHSNGYNYLDWYLQKPGQS | 929 |
| | Variable | PQLLIYLGSNRASGVPDRFSGSASGTDFTLKISRVEAEDVGVYYCMQA | |
| | Region | LQAFTFGPGTKVDIK | |
| | LCDR1 | RSSQSLLHSNGYNYLD | 930 |
| | LCDR2 | LGSNRAS | 931 |
| | LCDR3 | MQALQAFT | 932 |
| | LFRW1 | DIVMTQSPLSLPVTPGEPASISC | 933 |
| | LFRW2 | WYLQKPGQSPQLLIY | 934 |
| | LFRW3 | GVPDRFSGSASGTDFTLKISRVEAEDVGVYYC | 935 |
| | LFRW4 | FGPGTKVDIK | 936 |
| S144-509 | Heavy Chain | EVQLVQSGAEVKKPGESLKISCKGSAYTFTTYWIGWVRQMPGKGLE | 937 |
| (Spike/ | | WMGIIYPGDSDTRYSPSFQGQVTISADKSISTAYLQWSSLKASDTAMY | |
| RBD) | | YCARLLLVAGPFDYWGQGTLVTVSSASTKGPSVFPLAPSSKSTSGGT | |
| | | AALGCLVKDYFPEPVTVSWNSGALTSGVHTFPAVLQSSGLYSLSSVV | |
| | | TVPSSSLGTQTYICNVNHKPSNTKVD | |
| | Heavy Chain | EVQLVQSGAEVKKPGESLKISCKGSAYTFTTYWIGWVRQMPGKGLE | 938 |
| | Variable | WMGIIYPGDSDTRYSPSFQGQVTISADKSISTAYLQWSSLKASDTAMY | |
| | Region | YCARLLLVAGPFDYWGQGTLVTVSS | |
| | HCDR1 | TYWIG | 939 |
| | HCDR2 | IIYPGDSDTRYSPSFQG | 940 |
| | HCDR3 | LLLVAGPFDY | 941 |
| | HFRW1 | EVQLVQSGAEVKKPGESLKISCKGSAYTFT | 942 |
| | HFRW2 | WVRQMPGKGLEWMG | 943 |
| | HFRW3 | QVTISADKSISTAYLQWSSLKASDTAMYYCAR | 944 |
| | HFRW4 | WGQGTLVTVSS | 945 |
| | Light Chain | DIQMTQSPSTLSASVGDRVTITCRASQSISSWLAWYQQKPGKAPNLLI | 946 |
| | | YDASSLESGVPSRFSGSGSGTEFTLTISSLQPDDFATYYCQQYNSYPW | |
| | | TFGQGTKVEIKRTVAAPSVFIFPPSDEQLKSGTASVVCLLNNFYPREA | |
| | | KVQWKVDN | |
| | Light Chain | DIQMTQSPSTLSASVGDRVTITCRASQSISSWLAWYQQKPGKAPNLLI | 947 |
| | Variable | YDASSLESGVPSRFSGSGSGTEFTLTISSLQPDDFATYYCQQYNSYPW | |
| | Region | TFGQGTKVEIK | |
| | LCDR1 | RASQSISSWLA | 948 |
| | LCDR2 | DASSLES | 949 |
| | LCDR3 | QQYNSYPWT | 950 |
| | LFRW1 | DIQMTQSPSTLSASVGDRVTITC | 951 |
| | LFRW2 | WYQQKPGKAPNLLIY | 952 |
| | LFRW3 | GVPSRFSGSGSGTEFTLTISSLQPDDFATYYC | 953 |
| | LFRW4 | FGQGTKVEIK | 954 |
| S144-516 | Heavy Chain | QVQLLQSGAEVKKPGASVKVSCKASGYTFTGYYMHWVRQAPGQGL | 955 |
| (ORF8) | | EWMGRINPNSGGTNYAQKFQGRVTMTRDTSISTAYMELSRLTSDDTA | |
| | | VYYCATKTGIDRYYYYYMDVWGKGTTVTVSSASTKGPSVFPLAPSS | |
| | | KSTSGGTAALGCLVKDYFPEPVTVSWNSGALTSGVHTFPAVLQSSG | |
| | Heavy Chain | QVQLLQSGAEVKKPGASVKVSCKASGYTFTGYYMHWVRQAPGQGL | 956 |
| | Variable | EWMGRINPNSGGTNYAQKFQGRVTMTRDTSISTAYMELSRLTSDDTA | |
| | Region | VYYCATKTGIDRYYYYYMDVWGKGTTVTVSS | |
| | HCDR1 | GYYMH | 957 |
| | HCDR2 | RINPNSGGTNYAQKFQG | 958 |
| | HCDR3 | KTGIDRYYYYYMDV | 959 |
| | HFRW1 | QVQLLQSGAEVKKPGASVKVSCKASGYTFT | 960 |
| | HFRW2 | WVRQAPGQGLEWMG | 961 |
| | HFRW3 | RVTMTRDTSISTAYMELSRLTSDDTAVYYCAT | 962 |
| | HFRW4 | WGKGTTVTVSS | 963 |
| | Light Chain | QSVLTQPPSVSEAPGQRVTISCTGSSSNIGAGYDVHWYQQLPGTAPKL | 964 |
| | | LIYGNINRPSGVPDRFSGSKSGTSASLAITGLQAEDEADYYCQSYDNS | |
| | | LNGSVFGGGTKLTVLRQPKAAPSVTLFPPSSEELQANKATLVCLISDF | |
| | | YPGAVTVAWKADSSPVKAGVETTTPSKQSNNKYAASS | |
| | Light Chain | QSVLTQPPSVSEAPGQRVTISCTGSSSNIGAGYDVHWYQQLPGTAPKL | 965 |
| | Variable | LIYGNINRPSGVPDRFSGSKSGTSASLAITGLQAEDEADYYCQSYDNS | |
| | Region | LNGSVFGGGTKLTVL | |
| | LCDR1 | TGSSSNIGAGYDVH | 966 |
| | LCDR2 | GNINRPS | 967 |
| | LCDR3 | QSYDNSLNGSV | 968 |
| | LFRW1 | QSVLTQPPSVSEAPGQRVTISC | 969 |
| | LFRW2 | WYQQLPGTAPKLLIY | 970 |
| | LFRW3 | GVPDRFSGSKSGTSASLAITGLQAEDEADYYC | 971 |
| | LFRW4 | FGGGTKLTVL | 972 |
| S144-568 | Heavy Chain | QVQLQESGPGLVKPSETLSLTCSVSGGSISDYYWSWIRQPPGKGLEWI | 973 |
| (Spike/ | | GYIYNSGSTNYNPSLKSRVTISADPSKNQFSLKLSSVTAADTAVYYCA | |
| RBD) | | RPHGGDYAFDIWGQGTMVTVSSASPTSPKVFPLSLDSTPQDGNVVVA | |
| | | CLVQGFFPQEPLSVTWSESGQNVTARNF | |
| | Heavy Chain | QVQLQESGPGLVKPSETLSLTCSVSGGSISDYYWSWIRQPPGKGLEWI | 974 |
| | Variable | GYIYNSGSTNYNPSLKSRVTISADPSKNQFSLKLSSVTAADTAVYYCA | |
| | Region | RPHGGDYAFDIWGQGTMVTVSS | |
| | HCDR1 | DYYWS | 975 |
| | HCDR2 | YIYNSGSTNYNPSLKS | 976 |
| | HCDR3 | PHGGDYAFDI | 977 |
| | HFRW1 | QVQLQESGPGLVKPSETLSLTCSVSGGSIS | 978 |
| | HFRW2 | WIRQPPGKGLEWIG | 979 |
| | HFRW3 | RVTISADPSKNQFSLKLSSVTAADTAVYYCAR | 980 |
| | HFRW4 | WGQGTMVTVSS | 981 |
| | Light Chain | EIVLTQSPGTLSLSPGERATLSCRASQSVSSNFLAWYQQKPGQPPRLLI | 982 |
| | | YGASVRATGIPDRFSGSGSGTDFTLTITRLEPEDFAVYYCQQYGSLPRT | |
| | | FGQGTKVEIKRTVAAPSVFIFPPSDEQLKSGTASVVCLLNNFYPREAK | |
| | | VQWKVDNALQSGNSQESVTEQDSKDSTYSLSSTLTLSKADYE | |
| | Light Chain | EIVLTQSPGTLSLSPGERATLSCRASQSVSSNFLAWYQQKPGQPPRLLI | 983 |
| | Variable | YGASVRATGIPDRFSGSGSGTDFTLTITRLEPEDFAVYYCQQYGSLPRT | |
| | Region | FGQGTKVEIK | |
| | LCDR1 | RASQSVSSNFLA | 984 |
| | LCDR2 | GASVRAT | 985 |
| | LCDR3 | QQYGSLPRT | 986 |
| | LFRW1 | EIVLTQSPGTLSLSPGERATLSC | 987 |
| | LFRW2 | WYQQKPGQPPRLLIY | 988 |
| | LFRW3 | GIPDRFSGSGSGTDFTLTITRLEPEDFAVYYC | 989 |
| | LFRW4 | FGQGTKVEIK | 990 |
| S144-576 | Heavy Chain | QVQLVQSGAEVMKPGSSVKVSCKASGGTFSSYSITWVRQAPGQGLE | 991 |
| (Spike/ | | WMGRIIPILGIANYAQKFQGRVTITADKSTSTAYMELSSLRSEDTAVY | |
| RBD) | | YCARGYSGSPSNLDGMDVWGQGTTVTVSSASTKGPSVFPLAPSSKST | |
| | | SGGTAALGCLVKDYFPEPVTVSWNSGALTSGVHTFPAVLQSSG | |
| | Heavy Chain | QVQLVQSGAEVMKPGSSVKVSCKASGGTFSSYSITWVRQAPGQGLE | 992 |
| | Variable | WMGRIIPILGIANYAQKFQGRVTITADKSTSTAYMELSSLRSEDTAVY | |
| | Region | YCARGYSGSPSNLDGMDVWGQGTTVTVSS | |
| | HCDR1 | SYSIT | 993 |
| | HCDR2 | RIIPILGIANYAQKFQG | 994 |
| | HCDR3 | GYSGSPSNLDGMDV | 995 |
| | HFRW1 | QVQLVQSGAEVMKPGSSVKVSCKASGGTFS | 996 |
| | HFRW2 | WVRQAPGQGLEWMG | 997 |
| | HFRW3 | RVTITADKSTSTAYMELSSLRSEDTAVYYCAR | 998 |
| | HFRW4 | WGQGTTVTVSS | 999 |
| | Light Chain | IQMTQSPSTLSASVGDRVTITCRASQSISSWLAWYQQKPGKAPKLLIY | 1000 |
| | | DASSLQSGVPSRFSGSGSGTEFTLTISSLQPDDFATYYCQQYNSYSPITF | |
| | | GQGTRLEIKRTVAAPSVFIFPPSDEQLKSGTASVVCLLNNFYPREAKV | |
| | | QWKVDNALQSGNSQESVTEQDSKDSTYSLSSTLTLSKADYE | |
| | Light Chain | IQMTQSPSTLSASVGDRVTITCRASQSISSWLAWYQQKPGKAPKLLIY | 1001 |
| | Variable | DASSLQSGVPSRFSGSGSGTEFTLTISSLQPDDFATYYCQQYNSYSPITF | |
| | Region | GQGTRLEIK | |
| | LCDR1 | RASQSISSWLA | 1002 |
| | LCDR2 | DASSLQS | 1003 |
| | LCDR3 | QQYNSYSPIT | 1004 |
| | LFRW1 | IQMTQSPSTLSASVGDRVTITC | 1005 |
| | LFRW2 | WYQQKPGKAPKLLIY | 1006 |
| | LFRW3 | GVPSRFSGSGSGTEFTLTISSLQPDDFATYYC | 1007 |
| | LFRW4 | FGQGTRLEIK | 1008 |
| S144-588 | Heavy Chain | QLQLQESGPGLVKPSETLSLTCTVSGGSISSSSYYWGWIRQPPGKGLE | 1009 |
| (ORF8) | | WIGSIYYSGSTYYNPSLKSRFTISVDTSKNQFSLKLSSVTAADTAVYYC | |
| | | AAYQRKLGYCRGNSCFSCFDPWGQGTLVTVSSASTKGPSVFPLAPSS | |
| | | KSTSGGTAALGCLVKDYFPEPVTVSWNSGALTSGVHTFPAVLQSSG | |
| | Heavy Chain | QLQLQESGPGLVKPSETLSLTCTVSGGSISSSSYYWGWIRQPPGKGLE | 1010 |
| | Variable | WIGSIYYSGSTYYNPSLKSRFTISVDTSKNQFSLKLSSVTAADTAVYYC | |
| | Region | AAYQRKLGYCRGNSCFSCFDPWGQGTLVTVSS | |
| | HCDR1 | SSSYYWG | 1011 |
| | HCDR2 | SIYYSGSTYYNPSLKS | 1012 |
| | HCDR3 | YQRKLGYCRGNSCFSCFDP | 1013 |
| | HFRW1 | QLQLQESGPGLVKPSETLSLTCTVSGGSIS | 1014 |
| | HFRW2 | WIRQPPGKGLEWIG | 1015 |
| | HFRW3 | RFTISVDTSKNQFSLKLSSVTAADTAVYYCAA | 1016 |
| | HFRW4 | WGQGTLVTVSS | 1017 |
| | Light Chain | SYELTQPPSVSVSPGQTASITCSGDKLGDKYACWYQQKPGQSPVLVIY | 1018 |
| | | QDTKRPSGIPERFSGSNSGNTATLTISGTQAMDEADYYCQAWDSSTV | |
| | | LFGGGTKLTVLGQPKAAPSVTLFPPSSEELQANKATLVCLISDFYPGA | |
| | | VTVAWKADSSPVKAGVETTTPSKQSNNKYAASSYLSLTPEQWKSH | |
| | Light Chain | SYELTQPPSVSVSPGQTASITCSGDKLGDKYACWYQQKPGQSPVLVIY | 1019 |
| | Variable | QDTKRPSGIPERFSGSNSGNTATLTISGTQAMDEADYYCQAWDSSTV | |
| | Region | LFGGGTKLTVL | |
| | LCDR1 | SGDKLGDKYAC | 1020 |
| | LCDR2 | QDTKRPS | 1021 |
| | LCDR3 | QAWDSSTVL | 1022 |
| | LFRW1 | SYELTQPPSVSVSPGQTASITC | 1023 |
| | LFRW2 | WYQQKPGQSPVLVIY | 1024 |
| | LFRW3 | GIPERFSGSNSGNTATLTISGTQAMDEADYYC | 1025 |
| | LFRW4 | FGGGTKLTVL | 1026 |
| S144-628 | Heavy Chain | EVHLVQSGAEVKQPGESLKISCKGSGYNFATYWIAWVRQMPGKGLE | 1027 |
| (Spike/ | | WMGIIYPGDSDTRYSPSFQGQVIISADKSIGTAFLQWSSLKASDTAMY | |
| RBD) | | YCARRGYSSSNYRVDEYYYYGMDVWGQGTTVTVSSASPTSPKVFPL | |
| | | SLCSTQPDGNVVIACLVQGFFPQEPLSVTWSESGQGVTARNFP | |
| | Heavy Chain | EVHLVQSGAEVKQPGESLKISCKGSGYNFATYWIAWVRQMPGKGLE | 1028 |
| | Variable | WMGIIYPGDSDTRYSPSFQGQVIISADKSIGTAFLQWSSLKASDTAMY | |
| | Region | YCARRGYSSSNYRVDEYYYYGMDVWGQGTTVTVSS | |
| | HCDR1 | TYWIA | 1029 |
| | HCDR2 | IIYPGDSDTRYSPSFQG | 1030 |
| | HCDR3 | RGYSSSNYRVDEYYYYGMDV | 1031 |
| | HFRW1 | EVHLVQSGAEVKQPGESLKISCKGSGYNFA | 1032 |
| | HFRW2 | WVRQMPGKGLEWMG | 1033 |
| | HFRW3 | QVIISADKSIGTAFLQWSSLKASDTAMYYCAR | 1034 |
| | HFRW4 | WGQGTTVTVSS | 1035 |
| | Light Chain | QSVLTQPPSMSGAPGQRVTISCTGSSSNIGAGYDVHWYQQLPGAAPK | 1036 |
| | | LLIYGDTSRPSGVPDRFSGSKSDTSASLAITGLQAEDEADYYCQSFDRS | |
| | | LSGLVIFGGGTRLTVLGQPKAAPSVTLFPPSSEELQANKATLVCLISDF | |
| | | YPGAVTVAWKADSSPVKAGVETTTPSKQSNNKYAASS*DRKS | |
| | Light Chain | QSVLTQPPSMSGAPGQRVTISCTGSSSNIGAGYDVHWYQQLPGAAPK | 1037 |
| | Variable | LLIYGDTSRPSGVPDRFSGSKSDTSASLAITGLQAEDEADYYCQSFDRS | |
| | Region | LSGLVIFGGGTRLTVL | |
| | LCDR1 | TGSSSNIGAGYDVH | 1038 |
| | LCDR2 | GDTSRPS | 1039 |
| | LCDR3 | QSFDRSLSGLVI | 1040 |
| | LFRW1 | QSVLTQPPSMSGAPGQRVTISC | 1041 |
| | LFRW2 | WYQQLPGAAPKLLIY | 1042 |
| | LFRW3 | GVPDRFSGSKSDTSASLAITGLQAEDEADYYC | 1043 |
| | LFRW4 | FGGGTRLTVL | 1044 |
| S144-740 | Heavy Chain | QVQLVQSGAEVKKPGASVKVSCKASGYTFTGYYMHWVRQAPGQGL | 1045 |
| (ORF8) | | EWMGRINPNSGDTNYAQKFQGRVTMTRDTSISTAYMELSRLRSDDT | |
| | | AVYYCARLGKGMAAARTVFDSWGQGTLVTVSSASTKGPSVFPLAPS | |
| | | SKSTSGGTAALGCLVKDYFPEPVTVSWNSGALTSGVHTFPAVLQSSG | |
| | Heavy Chain | QVQLVQSGAEVKKPGASVKVSCKASGYTFTGYYMHWVRQAPGQGL | 1046 |
| | Variable | EWMGRINPNSGDTNYAQKFQGRVTMTRDTSISTAYMELSRLRSDDT | |
| | Region | AVYYCARLGKGMAAARTVFDSWGQGTLVTVSS | |
| | HCDR1 | GYYMH | 1047 |
| | HCDR2 | RINPNSGDTNYAQKFQG | 1048 |
| | HCDR3 | LGKGMAAARTVFDS | 1049 |
| | HFRW1 | QVQLVQSGAEVKKPGASVKVSCKASGYTFT | 1050 |
| | HFRW2 | WVRQAPGQGLEWMG | 1051 |
| | HFRW3 | RVTMTRDTSISTAYMELSRLRSDDTAVYYCAR | 1052 |
| | HFRW4 | WGQGTLVTVSS | 1053 |
| | Light Chain | EVVLTQSPGTLSLSPGERATLSCRASQSVSSSYLAWYQQKPGQAPRLV | 1054 |
| | | IYGASSRATGIPDRFSGSGSGTDFTLTISRLEPEDFAVYYCQQFGSSPTF | |
| | | GRGTRLEIKRTVAAPSVFIFPPSDEQLKSGTASVVCLLNNFYPREAKV | |
| | | QWKVDNALQSGNSQESVTEQDSKDSTYSLSSTLTLSKADYE | |
| | Light Chain | EVVLTQSPGTLSLSPGERATLSCRASQSVSSSYLAWYQQKPGQAPRLV | 1055 |
| | Variable | IYGASSRATGIPDRFSGSGSGTDFTLTISRLEPEDFAVYYCQQFGSSPTF | |
| | Region | GRGTRLEIK | |
| | LCDR1 | RASQSVSSSYLA | 1056 |
| | LCDR2 | GASSRAT | 1057 |
| | LCDR3 | QQFGSSPT | 1058 |
| | LFRW1 | EVVLTQSPGTLSLSPGERATLSC | 1059 |
| | LFRW2 | WYQQKPGQAPRLVIY | 1060 |
| | LFRW3 | GIPDRFSGSGSGTDFTLTISRLEPEDFAVYYC | 1061 |
| | LFRW4 | FGRGTRLEIK | 1062 |
| S144-741 | Heavy Chain | QVHLVQSGAEVKKPGASVKVSCKASGYTFTGYYMNWVRQAPGQGL | 1063 |
| (ORF8) | | EWMGRINPNSGGTNYAQKFQGRVTMTRDTSISTAYMELSRLRSDDA | |
| | | AVYYCARAERYSSSWYNLYYWGQGTLVTVSSASTKGPSVFPLAPSSK | |
| | | STSGGTAALGCLVKDYFPEPVTVSWNSGALTSGVHTFPAVLQSSG | |
| | Heavy Chain | QVHLVQSGAEVKKPGASVKVSCKASGYTFTGYYMNWVRQAPGQGL | 1064 |
| | Variable | EWMGRINPNSGGTNYAQKFQGRVTMTRDTSISTAYMELSRLRSDDA | |
| | Region | AVYYCARAERYSSSWYNLYYWGQGTLVTVSS | |
| | HCDR1 | GYYMN | 1065 |
| | HCDR2 | RINPNSGGTNYAQKFQG | 1066 |
| | HCDR3 | AERYSSSWYNLYY | 1067 |
| | HFRW1 | QVHLVQSGAEVKKPGASVKVSCKASGYTFT | 1068 |
| | HFRW2 | WVRQAPGQGLEWMG | 1069 |
| | HFRW3 | RVTMTRDTSISTAYMELSRLRSDDAAVYYCAR | 1070 |
| | HFRW4 | WGQGTLVTVSS | 1071 |
| | Light Chain | QSVLTQPPSASGTPGQRVTISCSGSSSNIGSNTVNWYQQLPGTAPKLLI | 1072 |
| | | YSNNQRPSGVPDRFSGSKSGTSASLAISGLQSEDEADYYCAAWDDSL | |
| | | NGVVFGGGTKLTVLGQPKAAPSVTLFPPSSEELQANKATLVCLISDFY | |
| | | PGAVTVAWKADSSPVKAGVETTTPSKQSNNKYAASSYLSLTPEQWK | |
| | | SH | |
| | Light Chain | QSVLTQPPSASGTPGQRVTISCSGSSSNIGSNTVNWYQQLPGTAPKLLI | 1073 |
| | Variable | YSNNQRPSGVPDRFSGSKSGTSASLAISGLQSEDEADYYCAAWDDSL | |
| | Region | NGVVFGGGTKLTVL | |
| | LCDR1 | SGSSSNIGSNTVN | 1074 |
| | LCDR2 | SNNQRPS | 1075 |
| | LCDR3 | AAWDDSLNGVV | 1076 |
| | LFRW1 | QSVLTQPPSASGTPGQRVTISC | 1077 |
| | LFRW2 | WYQQLPGTAPKLLIY | 1078 |
| | LFRW3 | GVPDRFSGSKSGTSASLAISGLQSEDEADYYC | 1079 |
| | LFRW4 | FGGGTKLTVL | 1080 |
| S144-803 | Heavy Chain | EVQLVQSGAEVKKPGESLKISCKGSRYSFTRYWIAWVRQMPGKGLE | 1081 |
| (Spike/ | | WMGIIYPGDSDTRYSPSFQGPVTISADKSISTAYLQWSSLKASDTAIYY | |
| RBD) | | CARLPNSNYVDYWGQGTLVTVSSASTKGPSVFPLAPSSKSTSGGTAA | |
| | | LGCLVKDYFPEPVTVSWNSGALTSGVHTFPAVLQSSGLYSLSSVVTVP | |
| | | SSSLGTQTYICNVNHKPSNTKVD | |
| | Heavy Chain | EVQLVQSGAEVKKPGESLKISCKGSRYSFTRYWIAWVRQMPGKGLE | 1082 |
| | Variable | WMGIIYPGDSDTRYSPSFQGPVTISADKSISTAYLQWSSLKASDTAIYY | |
| | Region | CARLPNSNYVDYWGQGTLVTVSS | |
| | HCDR1 | RYWIA | 1083 |
| | HCDR2 | IIYPGDSDTRYSPSFQG | 1084 |
| | HCDR3 | LPNSNYVDY | 1085 |
| | HFRW1 | EVQLVQSGAEVKKPGESLKISCKGSRYSFT | 1086 |
| | HFRW2 | WVRQMPGKGLEWMG | 1087 |
| | HFRW3 | PVTISADKSISTAYLQWSSLKASDTAIYYCAR | 1088 |
| | HFRW4 | WGQGTLVTVSS | 1089 |
| | Light Chain | DIQMTQSPSTLSASVGDRVTITCRASQSISSWLAWYQQKPGKAPKLLI | 1090 |
| | | YDASSLESGVPSRFSGSGSGTEFTLTISSLQPDDFATYYCQQYNIYPYT | |
| | | FGQGTKLDIKRTVAAPSVFIFPPSDEQLKSGTASVVCLLNNFYPREAK | |
| | | VQWKVDNALQSGNSQESVTEQDSKDSTYSLSSTLTLSKADYE | |
| | Light Chain | DIQMTQSPSTLSASVGDRVTITCRASQSISSWLAWYQQKPGKAPKLLI | 1091 |
| | Variable | YDASSLESGVPSRFSGSGSGTEFTLTISSLQPDDFATYYCQQYNIYPYT | |
| | Region | FGQGTKLDIK | |
| | LCDR1 | RASQSISSWLA | 1092 |
| | LCDR2 | DASSLES | 1093 |
| | LCDR3 | QQYNIYPYT | 1094 |
| | LFRW1 | DIQMTQSPSTLSASVGDRVTITC | 1095 |
| | LFRW2 | WYQQKPGKAPKLLIY | 1096 |
| | LFRW3 | GVPSRFSGSGSGTEFTLTISSLQPDDFATYYC | 1097 |
| | LFRW4 | FGQGTKLDIK | 1098 |
| S144-843 | Heavy Chain | QVQLVESGGGVVQPGGSVRLSCAASGFDFTNNGMYWVRQAPGKGL | 1099 |
| (ORF8) | | EWVAFIRYDGNKQDYADSVKGRFTISRDNSKNTLYLQMSSLRPEDTA | |
| | | VYYCAKGVYTENYGWGQGTLVTVSSGTTVTVSSASTKGPSVFPLAPC | |
| | | SRSTSESTAALGCLVKDYFPEPVTVSWNSGALTSGVHTFPAVLQSSGL | |
| | | YSLSSVVTVPSSNFGTQTYTCNVDHKPSNTKVD | |
| | Heavy Chain | QVQLVESGGGVVQPGGSVRLSCAASGFDFTNNGMYWVRQAPGKGL | 1100 |
| | Variable | EWVAFIRYDGNKQDYADSVKGRFTISRDNSKNTLYLQMSSLRPEDTA | |
| | Region | VYYCAKGVYTENYGWGQGTLVTVSS | |
| | HCDR1 | NNGMY | 1101 |
| | HCDR2 | FIRYDGNKQDYADSVKG | 1102 |
| | HCDR3 | GVYTENYG | 1103 |
| | HFRW1 | QVQLVESGGGVVQPGGSVRLSCAASGFDFT | 1104 |
| | HFRW2 | WVRQAPGKGLEWVA | 1105 |
| | HFRW3 | RFTISRDNSKNTLYLQMSSLRPEDTAVYYCAK | 1106 |
| | HFRW4 | WGQGTLVTVSS | 1107 |
| | Light Chain | EIVLTQSPGTLSLSPGERATLSCRASQTVTSRYLAWYQQKPGQAPRLL | 1108 |
| | | IYGASTRATGIPDRFSGSGSGTDFTLTISRLEPEDFAVYYCQQYGNSPP | |
| | | YTFGQGTKLEIKRTVAAPSVFIFPPSDEQLKSGTASVVCLLNNFYPREA | |
| | | KVQWKVDNALQSGNSQESVTEQDSKDSTYSLSSTLTLSKADYE | |
| | Light Chain | EIVLTQSPGTLSLSPGERATLSCRASQTVTSRYLAWYQQKPGQAPRLL | 1109 |
| | Variable | IYGASTRATGIPDRFSGSGSGTDFTLTISRLEPEDFAVYYCQQYGNSPP | |
| | Region | YTFGQGTKLEIK | |
| | LCDR1 | RASQTVTSRYLA | 1110 |
| | LCDR2 | GASTRAT | 1111 |
| | LCDR3 | QQYGNSPPYT | 1112 |
| | LFRW1 | EIVLTQSPGTLSLSPGERATLSC | 1113 |
| | LFRW2 | WYQQKPGQAPRLLIY | 1114 |
| | LFRW3 | GIPDRFSGSGSGTDFTLTISRLEPEDFAVYYC | 1115 |
| | LFRW4 | FGQGTKLEIK | 1116 |
| S144-877 | Heavy Chain | QVQLVESGGGVVQPGRSLRLSCAASGFTFSTYGMHWVRQAPGKGLE | 1117 |
| (Spike/ | | WVAVISYDGSNKYYADSVKGRFTISRDNSKNTLYLQMNSLRAEDTA | |
| RBD) | | VYYCAKQQGTYCSGGNCYSGYFDYWGQGTLVTVSSASTKGPSVFPL | |
| | | APSSKSTSGGTAALGCLVKDYFPEPVTVSWNSGALTSGVHTFPAVLQ | |
| | | SSGLYSLSSVVTVPSSSLGTQTYIC | |
| | Heavy Chain | QVQLVESGGGVVQPGRSLRLSCAASGFTFSTYGMHWVRQAPGKGLE | 1118 |
| | Variable | WVAVISYDGSNKYYADSVKGRFTISRDNSKNTLYLQMNSLRAEDTA | |
| | Region | VYYCAKQQGTYCSGGNCYSGYFDYWGQGTLVTVSS | |
| | HCDR1 | TYGMH | 1119 |
| | HCDR2 | VISYDGSNKYYADSVKG | 1120 |
| | HCDR3 | QQGTYCSGGNCYSGYFDY | 1121 |
| | HFRW1 | QVQLVESGGGVVQPGRSLRLSCAASGFTFS | 1122 |
| | HFRW2 | WVRQAPGKGLEWVA | 1123 |
| | HFRW3 | RFTISRDNSKNTLYLQMNSLRAEDTAVYYCAK | 1124 |
| | HFRW4 | WGQGTLVTVSS | 1125 |
| | Light Chain | DIQMTQSPSSLSASVGDRVTITCQASQDISNYLNWYQQKPGKAPKLLI | 1126 |
| | | YDASNLETGVPSRFSGSGSGTDFSFSISSLQPEDIATYYCQQYDNVPLT | |
| | | FGGGTKVEIKRTVAAPSVFIFPPSDEQLKSGTASVVCLLNNFYPREAK | |
| | | VQWKVDNALQSGNSQESVTEQDSKDSTYSLSSTLTLSKADYE | |
| | Light Chain | DIQMTQSPSSLSASVGDRVTITCQASQDISNYLNWYQQKPGKAPKLLI | 1127 |
| | Variable | YDASNLETGVPSRFSGSGSGTDFSFSISSLQPEDIATYYCQQYDNVPLT | |
| | Region | FGGGTKVEIK | |
| | LCDR1 | QASQDISNYLN | 1128 |
| | LCDR2 | DASNLET | 1129 |
| | LCDR3 | QQYDNVPLT | 1130 |
| | LFRW1 | DIQMTQSPSSLSASVGDRVTITC | 1131 |
| | LFRW2 | WYQQKPGKAPKLLIY | 1132 |
| | LFRW3 | GVPSRFSGSGSGTDFSFSISSLQPEDIATYYC | 1133 |
| | LFRW4 | FGGGTKVEIK | 1134 |
| S144-952 | Heavy Chain | QVQLVQSGAEVKKPGASVKVSCTASGYTVTSYGISWVRQAPGQGLE | 1135 |
| (NP) | | WMGWISTYNGNTNYAQKLQGRVTMTTDTSTSTAYMELRSLRSDDT | |
| | | AVYYCAREYSYGYRLAYFDYWGQGTLVTVSSGSASAPTLFPLVSCEN | |
| | | SPSDTSSVAVGCLAQDFLPDSITFSWKYKNNSDISSTRGFPSVLRGGK | |
| | | YAATSQVLLPSKDVM | |
| | Heavy Chain | QVQLVQSGAEVKKPGASVKVSCTASGYTVTSYGISWVRQAPGQGLE | 1136 |
| | Variable | WMGWISTYNGNTNYAQKLQGRVTMTTDTSTSTAYMELRSLRSDDT | |
| | Region | AVYYCAREYSYGYRLAYFDYWGQGTLVTVSS | |
| | HCDR1 | SYGIS | 1137 |
| | HCDR2 | WISTYNGNTNYAQKLQG | 1138 |
| | HCDR3 | EYSYGYRLAYFDY | 1139 |
| | HFRW1 | QVQLVQSGAEVKKPGASVKVSCTASGYTVT | 1140 |
| | HFRW2 | WVRQAPGQGLEWMG | 1141 |
| | HFRW3 | RVTMTTDTSTSTAYMELRSLRSDDTAVYYCAR | 1142 |
| | HFRW4 | WGQGTLVTVSS | 1143 |
| | Light Chain | DIVMTQSPDSLAVSLGERATINCKSSQSVLNSSNNKNYLAWYQQKPG | 1144 |
| | | QPPKLLIYWASTRESGVPDRFSGSGSGTDFTLTISSLQAEDVAVYYCQ | |
| | | QYYSTPQTFGQGTKVEIKRTVAAPSVFIFPPSDEQLKSGTASVVCLLN | |
| | | NFYPREAKVQWKVDNALQSGNSQESVTEQDSKDSTYSLSSTLTLSKA | |
| | | DYE | |
| | Light Chain | DIVMTQSPDSLAVSLGERATINCKSSQSVLNSSNNKNYLAWYQQKPG | 1145 |
| | Variable | QPPKLLIYWASTRESGVPDRFSGSGSGTDFTLTISSLQAEDVAVYYCQ | |
| | Region | QYYSTPQTFGQGTKVEIK | |
| | LCDR1 | KSSQSVLNSSNNKNYLA | 1146 |
| | LCDR2 | WASTRES | 1147 |
| | LCDR3 | QQYYSTPQT | 1148 |
| | LFRW1 | DIVMTQSPDSLAVSLGERATINC | 1149 |
| | LFRW2 | WYQQKPGQPPKLLIY | 1150 |
| | LFRW3 | GVPDRFSGSGSGTDFTLTISSLQAEDVAVYYC | 1151 |
| | LFRW4 | FGQGTKVEIK | 1152 |
| S144-971 | Heavy Chain | EVQLVESGGGLVQPGGSLRISCSASGFTFSRYAMHWVRQAPGKGLEY | 1153 |
| (ORF8) | | VSAIRSNGGSTYYADSVRGRFTISRDNSRNTLYLQMSSLRAEDTAVY | |
| | | YCVIINNLAAAGTRFDYWGQGTLVTVSSASTKGPSVFPLAPSSKSTSG | |
| | | GTAALGCLVKDYFPEPVTVSWNSGALTSGVHTFPAVLQSSG | |
| | Heavy Chain | EVQLVESGGGLVQPGGSLRISCSASGFTFSRYAMHWVRQAPGKGLEY | 1154 |
| | Variable | VSAIRSNGGSTYYADSVRGRFTISRDNSRNTLYLQMSSLRAEDTAVY | |
| | Region | YCVIINNLAAAGTRFDYWGQGTLVTVSS | |
| | HCDR1 | RYAMH | 1155 |
| | HCDR2 | AIRSNGGSTYYADSVRG | 1156 |
| | HCDR3 | INNLAAAGTRFDY | 1157 |
| | HFRW1 | EVQLVESGGGLVQPGGSLRISCSASGFTFS | 1158 |
| | HFRW2 | WVRQAPGKGLEYVS | 1159 |
| | HFRW3 | RFTISRDNSRNTLYLQMSSLRAEDTAVYYCVI | 1160 |
| | HFRW4 | WGQGTLVTVSS | 1161 |
| | Light Chain | DIVMTQSPDSLAVSLGERATINCKSSQSVLYSSNNKNFLTWYQQKPG | 1162 |
| | | QPPKLLIYWASTRESGVPDRFSGSGSGTDFTLTISSLQAEDVAVYYCQ | |
| | | QYYTTPWTFGQGTKVEIKRTVAAPSVFIFPPSDEQLKSGTASVVCLLN | |
| | | NFYPREAKVQWKVDNALQSGNSQESVTEQDSKDSTYSLSSTLTLSKA | |
| | | DYE | |
| | Light Chain | DIVMTQSPDSLAVSLGERATINCKSSQSVLYSSNNKNFLTWYQQKPG | 1163 |
| | Variable | QPPKLLIYWASTRESGVPDRFSGSGSGTDFTLTISSLQAEDVAVYYCQ | |
| | Region | QYYTTPWTFGQGTKVEIK | |
| | LCDR1 | KSSQSVLYSSNNKNFLT | 1164 |
| | LCDR2 | WASTRES | 1165 |
| | LCDR3 | QQYYTTPWT | 1166 |
| | LFRW1 | DIVMTQSPDSLAVSLGERATINC | 1167 |
| | LFRW2 | WYQQKPGQPPKLLIY | 1168 |
| | LFRW3 | GVPDRFSGSGSGTDFTLTISSLQAEDVAVYYC | 1169 |
| | LFRW4 | FGQGTKVEIK | 1170 |
| S144-1036 | Heavy Chain | QVQLQQWGAGLLKPSETLSLTCAVYGGSFSGYFWSWIRQPPGKGLE | 1171 |
| (NP) | | WIGEINHSGSTNYNPSLKSRVTISVDTSKNQFSLKLSSVTAADTAVYY | |
| | | CARAPYYDFLREGNWFDPWGQGTLVTVSSASTKGPSVFPLAPSSKST | |
| | | SGGTAALGCLVKDYFPEPVTVSWNSGALTSGVHTFPAVLQSSGLYSL | |
| | | SSVVTVPSSSLGTQTYICNVNHKPS | |
| | Heavy Chain | QVQLQQWGAGLLKPSETLSLTCAVYGGSFSGYFWSWIRQPPGKGLE | 1172 |
| | Variable | WIGEINHSGSTNYNPSLKSRVTISVDTSKNQFSLKLSSVTAADTAVYY | |
| | Region | CARAPYYDFLREGNWFDPWGQGTLVTVSS | |
| | HCDR1 | GYFWS | 1173 |
| | HCDR2 | EINHSGSTNYNPSLKS | 1174 |
| | HCDR3 | APYYDFLREGNWFDP | 1175 |
| | HFRW1 | QVQLQQWGAGLLKPSETLSLTCAVYGGSFS | 1176 |
| | HFRW2 | WIRQPPGKGLEWIG | 1177 |
| | HFRW3 | RVTISVDTSKNQFSLKLSSVTAADTAVYYCAR | 1178 |
| | HFRW4 | WGQGTLVTVSS | 1179 |
| | Light Chain | DIVMTQSPDSLAVSLGERATINCNSSQSVLYSSINKNYLAWYQQKPA | 1180 |
| | | QPPKVLIYWASTRESGVPDRFSGSGSGTDFTLTISSLQAEDVAVYYCQ | |
| | | QYYRTPWTFGQGTKVEIKRTVAAPSVFIFPPSDEQLKSGTASVVCLLN | |
| | | NFYPREAKVQWKVDNALQSGNSQESVTEQDSKDSTYSLSSTLTLSKA | |
| | | DYE | |
| | Light Chain | DIVMTQSPDSLAVSLGERATINCNSSQSVLYSSINKNYLAWYQQKPA | 1181 |
| | Variable | QPPKVLIYWASTRESGVPDRFSGSGSGTDFTLTISSLQAEDVAVYYCQ | |
| | Region | QYYRTPWTFGQGTKVEIK | |
| | LCDR1 | NSSQSVLYSSINKNYLA | 1182 |
| | LCDR2 | WASTRES | 1183 |
| | LCDR3 | QQYYRTPWT | 1184 |
| | LFRW1 | DIVMTQSPDSLAVSLGERATINC | 1185 |
| | LFRW2 | WYQQKPAQPPKVLIY | 1186 |
| | LFRW3 | GVPDRFSGSGSGTDFTLTISSLQAEDVAVYYC | 1187 |
| | LFRW4 | FGQGTKVEIK | 1188 |
| S144-1079 | Heavy Chain | QVQLVQSGAEVKKPGSSVKVSCKASGDTFGSYSITWVRQAPGQGLE | 1189 |
| (Spike/ | | WMGRIIPVLGIANYAQKFQGRVTITADKSTSTAYMELSSLRSEDTAVY | |
| RBD) | | YCAGGGCSGGNCYSWYNWFDPWGQGSLVTVSSASTKGPSVFPLAPS | |
| | | SKSTSGGTAALGCLVKDYFPEPVTVSWNSGALTSGVHTFPAVLQSSG | |
| | Heavy Chain | QVQLVQSGAEVKKPGSSVKVSCKASGDTFGSYSITWVRQAPGQGLE | 1190 |
| | Variable | WMGRIIPVLGIANYAQKFQGRVTITADKSTSTAYMELSSLRSEDTAVY | |
| | Region | YCAGGGCSGGNCYSWYNWFDPWGQGSLVTVSS | |
| | HCDR1 | SYSIT | 1191 |
| | HCDR2 | RIIPVLGIANYAQKFQG | 1192 |
| | HCDR3 | GGCSGGNCYSWYNWFDP | 1193 |
| | HFRW1 | QVQLVQSGAEVKKPGSSVKVSCKASGDTFG | 1194 |
| | HFRW2 | WVRQAPGQGLEWMG | 1195 |
| | HFRW3 | RVTITADKSTSTAYMELSSLRSEDTAVYYCAG | 1196 |
| | HFRW4 | WGQGSLVTVSS | 1197 |
| | Light Chain | EIVLTQSPGTLSLSPGERATLSCRASQSVSSNYLAWYQQKPGQAPRLLI | 1198 |
| | | YGASSRATGIPERFSGSGSGTDFTLTISRLEPEDFAVYYCQQYGRSPYT | |
| | | FGQGTKLEIKRTVAAPSVFIFPPSDEQLKSGTASVVCLLNNFYPREAK | |
| | | VQWKVDNALQSGNSQESVTEQDSKDSTYSLSSTLTLSKADYE | |
| | Light Chain | EIVLTQSPGTLSLSPGERATLSCRASQSVSSNYLAWYQQKPGQAPRLLI | 1199 |
| | Variable | YGASSRATGIPERFSGSGSGTDFTLTISRLEPEDFAVYYCQQYGRSPYT | |
| | Region | FGQGTKLEIK | |
| | LCDR1 | RASQSVSSNYLA | 1200 |
| | LCDR2 | GASSRAT | 1201 |
| | LCDR3 | QQYGRSPYT | 1202 |
| | LFRW1 | EIVLTQSPGTLSLSPGERATLSC | 1203 |
| | LFRW2 | WYQQKPGQAPRLLIY | 1204 |
| | LFRW3 | GIPERFSGSGSGTDFTLTISRLEPEDFAVYYC | 1205 |
| | LFRW4 | FGQGTKLEIK | 1206 |
| S144-1299 | Heavy Chain | QVQLQESGPGLVKPSETLSLTCTVSGGSISSYYWSWIRQPPGKGLEWI | 1207 |
| (ORF8) | | GYINYRGITNYNPSLKSRVTISVDMSKNQFSLKLSSVTAADTAVYSCA | |
| | | RLAVASRGTVDYWGQGTLVTVSSASTKGPSVFPLAPSSKSTSGGTAA | |
| | | LGCLVKDYFPEPVTVSWNSGALTSGVHTFPAVLQSSGLYSLSSVVTVP | |
| | | SSNFGTQTYTCNVDHKPSNTKVD | |
| | Heavy Chain | QVQLQESGPGLVKPSETLSLTCTVSGGSISSYYWSWIRQPPGKGLEWI | 1208 |
| | Variable | GYINYRGITNYNPSLKSRVTISVDMSKNQFSLKLSSVTAADTAVYSCA | |
| | Region | RLAVASRGTVDYWGQGTLVTVSS | |
| | HCDR1 | SYYWS | 1209 |
| | HCDR2 | YINYRGITNYNPSLKS | 1210 |
| | HCDR3 | LAVASRGTVDY | 1211 |
| | HFRW1 | QVQLQESGPGLVKPSETLSLTCTVSGGSIS | 1212 |
| | HFRW2 | WIRQPPGKGLEWIG | 1213 |
| | HFRW3 | RVTISVDMSKNQFSLKLSSVTAADTAVYSCAR | 1214 |
| | HFRW4 | WGQGTLVTVSS | 1215 |
| | Light Chain | QSVLTQPPSASGTPGQRVTISCSGSSSNIGSNYVYWYQQLPGTAPKLLI | 1216 |
| | | YRNNQRPSGVPDRFSGSKSGTSASLAISGLRSEDEADYYCAAWDDSL | |
| | | SVNVVFGGGTKLTVLGQPKAAPSVTLFPPSSEELQANKATLVCLISDF | |
| | | YPGAVTVAWKADSSPVKAGVETTKPSKQSNNKYAASSYLSLTPEQW | |
| | | KSH | |
| | Light Chain | QSVLTQPPSASGTPGQRVTISCSGSSSNIGSNYVYWYQQLPGTAPKLLI | 1217 |
| | Variable | YRNNQRPSGVPDRFSGSKSGTSASLAISGLRSEDEADYYCAAWDDSL | |
| | Region | SVNVVFGGGTKLTVL | |
| | LCDR1 | SGSSSNIGSNYVY | 1218 |
| | LCDR2 | RNNQRPS | 1219 |
| | LCDR3 | AAWDDSLSVNVV | 1220 |
| | LFRW1 | QSVLTQPPSASGTPGQRVTISC | 1221 |
| | LFRW2 | WYQQLPGTAPKLLIY | 1222 |
| | LFRW3 | GVPDRFSGSKSGTSASLAISGLRSEDEADYYC | 1223 |
| | LFRW4 | FGGGTKLTVL | 1224 |
| S144-1339 | Heavy Chain | QVQLVQSGTEVKKPGASVKVSCKASGYTFTDYYMHWVRQAPGQGL | 1225 |
| (Spike/ | | EWMGRINPTSGGTNYPQKFQGSVTMTRDTSLSTVYMELSGLRSDDTA | |
| RBD) | | VYYCARERVTLIQGKNHYYMDVWGTGTTVTVSSASTKGPSVFPLAPS | |
| | | SKSTSGGTAALGCLVKDYFPEPVTVSWNSGALTSGVHTFPAVLQSSG | |
| | Heavy Chain | QVQLVQSGTEVKKPGASVKVSCKASGYTFTDYYMHWVRQAPGQGL | 1226 |
| | Variable | EWMGRINPTSGGTNYPQKFQGSVTMTRDTSLSTVYMELSGLRSDDTA | |
| | Region | VYYCARERVTLIQGKNHYYMDVWGTGTTVTVSS | |
| | HCDR1 | DYYMH | 1227 |
| | HCDR2 | RINPTSGGTNYPQKFQG | 1228 |
| | HCDR3 | ERVTLIQGKNHYYMDV | 1229 |
| | HFRW1 | QVQLVQSGTEVKKPGASVKVSCKASGYTFT | 1230 |
| | HFRW2 | WVRQAPGQGLEWMG | 1231 |
| | HFRW3 | SVTMTRDTSLSTVYMELSGLRSDDTAVYYCAR | 1232 |
| | HFRW4 | WGTGTTVTVSS | 1233 |
| | Light Chain | QSALTQPASVSGSPGQSITISCTGTNSDVGGYNYVSWYQQHPGKAPR | 1234 |
| | | LMIYDVSNRPSGVSNRFSGSKSGNTASLTISGLQAEDEADYYCSSYTS | |
| | | SSTLVVFGGGTKLTVLGQPKAAPSVTLFPPSSEELQANKATLVCLISDF | |
| | | YPGAVTVAWKADSSPVKAGVETTTPSKQSNNKYAASSYLSLTPEQW | |
| | | KSH | |
| | Light Chain | QSALTQPASVSGSPGQSITISCTGTNSDVGGYNYVSWYQQHPGKAPR | 1235 |
| | Variable | LMIYDVSNRPSGVSNRFSGSKSGNTASLTISGLQAEDEADYYCSSYTS | |
| | Region | SSTLVVFGGGTKLTVL | |
| | LCDR1 | TGTNSDVGGYNYVS | 1236 |
| | LCDR2 | DVSNRPS | 1237 |
| | LCDR3 | SSYTSSSTLVV | 1238 |
| | LFRW1 | QSALTQPASVSGSPGQSITISC | 1239 |
| | LFRW2 | WYQQHPGKAPRLMIY | 1240 |
| | LFRW3 | GVSNRFSGSKSGNTASLTISGLQAEDEADYYC | 1241 |
| | LFRW4 | FGGGTKLTVL | 1242 |
| S144-1406 | Heavy Chain | QVQLVQSGAEVKKPGASVKVSCKASGYTFTTYAMHWVRQAPGQRL | 1243 |
| (Spike/ | | EWMGWINAGNGNTKYSQNFQGRVTITRDTSASTAYMELSSLRSEDT | |
| RBD) | | AVYYCASLVGGDSSSWYDYMDVWGKGTTVTVSSASTKGPSVFPLAP | |
| | | CSRSTSESTAALGCLVKDYFPEPVTVSWNSGALTSGVHTFPAVLQSSG | |
| | | LYSLSSVVTVPSSNF | |
| | Heavy Chain | QVQLVQSGAEVKKPGASVKVSCKASGYTFTTYAMHWVRQAPGQRL | 1244 |
| | Variable | EWMGWINAGNGNTKYSQNFQGRVTITRDTSASTAYMELSSLRSEDT | |
| | Region | AVYYCASLVGGDSSSWYDYMDVWGKGTTVTVSS | |
| | HCDR1 | TYAMH | 1245 |
| | HCDR2 | WINAGNGNTKYSQNFQG | 1246 |
| | HCDR3 | LVGGDSSSWYDYMDV | 1247 |
| | HFRW1 | QVQLVQSGAEVKKPGASVKVSCKASGYTFT | 1248 |
| | HFRW2 | WVRQAPGQRLEWMG | 1249 |
| | HFRW3 | RVTITRDTSASTAYMELSSLRSEDTAVYYCAS | 1250 |
| | HFRW4 | WGKGTTVTVSS | 1251 |
| | Light Chain | DIQMTQSPSTLSASVGDRVTITCRASQSISSWLAWYQQKPGKAPKLLI | 1252 |
| | | YDASSLESGVPSRFSGSGSGTEFTLTISSLQPDDFATYYCQQYNSYPW | |
| | | TFGQGTKVEIKRTVAAPSVFIFPPSDEQLKSGTASVVCLLNNFYPREA | |
| | | KVQWKVDNALQSGNSQESVTEQDSKDSTYSLSSTLTLSKADYE | |
| | Light Chain | DIQMTQSPSTLSASVGDRVTITCRASQSISSWLAWYQQKPGKAPKLLI | 1253 |
| | Variable | YDASSLESGVPSRFSGSGSGTEFTLTISSLQPDDFATYYCQQYNSYPW | |
| | Region | TFGQGTKVEIK | |
| | LCDR1 | RASQSISSWLA | 1254 |
| | LCDR2 | DASSLES | 1255 |
| | LCDR3 | QQYNSYPWT | 1256 |
| | LFRW1 | DIQMTQSPSTLSASVGDRVTITC | 1257 |
| | LFRW2 | WYQQKPGKAPKLLIY | 1258 |
| | LFRW3 | GVPSRFSGSGSGTEFTLTISSLQPDDFATYYC | 1259 |
| | LFRW4 | FGQGTKVEIK | 1260 |
| S144-1407 | Heavy Chain | QVQLVQSGAEVKKPGSSVKVSCKASGGTFSSYTISWVRQAPGQGLE | 1261 |
| (Spike/ | | WMGRIIPVRDIANYAQKFQGRVTITADKSTRTAYMEVSSLRSEDTAV | |
| RBD) | | YYCAATELRSDGLDIWGQGTMVTVSSASTKGPSVFPLAPSSKSTSGGT | |
| | | AALGCLVKDYFPEPVTVSWNSGALTSGVHTFPAVLQSSG | |
| | Heavy Chain | QVQLVQSGAEVKKPGSSVKVSCKASGGTFSSYTISWVRQAPGQGLE | 1262 |
| | Variable | WMGRIIPVRDIANYAQKFQGRVTITADKSTRTAYMEVSSLRSEDTAV | |
| | Region | YYCAATELRSDGLDIWGQGTMVTVSS | |
| | HCDR1 | SYTIS | 1263 |
| | HCDR2 | RIIPVRDIANYAQKFQG | 1264 |
| | HCDR3 | TELRSDGLDI | 1265 |
| | HFRW1 | QVQLVQSGAEVKKPGSSVKVSCKASGGTFS | 1266 |
| | HFRW2 | WVRQAPGQGLEWMG | 1267 |
| | HFRW3 | RVTITADKSTRTAYMEVSSLRSEDTAVYYCAA | 1268 |
| | HFRW4 | WGQGTMVTVSS | 1269 |
| | Light Chain | DIQMTQSPSTLSASVGDRVTITCRASQSISSWLAWYQQKPGKAPKLLI | 1270 |
| | | YDASSLESGVPSRFSGSGSGTEFTLTVSSLQPDDFATYYCQQYNNYSPI | |
| | | TFGQGTKLEIKRTVAAPSVFIFPPSDEQLKSGTASVVCLLNNFYPREAK | |
| | | VQWKVDNALQSGNSQESVTEQDSKDSTYSLSSTLTLSKADYE | |
| | Light Chain | DIQMTQSPSTLSASVGDRVTITCRASQSISSWLAWYQQKPGKAPKLLI | 1271 |
| | Variable | YDASSLESGVPSRFSGSGSGTEFTLTVSSLQPDDFATYYCQQYNNYSPI | |
| | Region | TFGQGTKLEIK | |
| | LCDR1 | RASQSISSWLA | 1272 |
| | LCDR2 | DASSLES | 1273 |
| | LCDR3 | QQYNNYSPIT | 1274 |
| | LFRW1 | DIQMTQSPSTLSASVGDRVTITC | 1275 |
| | LFRW2 | WYQQKPGKAPKLLIY | 1276 |
| | LFRW3 | GVPSRFSGSGSGTEFTLTVSSLQPDDFATYYC | 1277 |
| | LFRW4 | FGQGTKLEIK | 1278 |
| S144-1569 | Heavy Chain | QVQLVQSGAEVKKPGASVKVSCKASGYTFSNYGISWVRQAPGQGLE | 1279 |
| (ORF8) | | WMGWISAYNGNTKYPQKLQGRVTMSTDTSTSTAYMELRSLRSDDTA | |
| | | VYYCARETRYGMDVWGQGTTVTVSSASTKGPSVFPLAPSSKSTSGGT | |
| | | AALGCLVKDYFPEPVTVSWNSGALTSGVHTFPAVLQSSG | |
| | Heavy Chain | QVQLVQSGAEVKKPGASVKVSCKASGYTFSNYGISWVRQAPGQGLE | 1280 |
| | Variable | WMGWISAYNGNTKYPQKLQGRVTMSTDTSTSTAYMELRSLRSDDTA | |
| | Region | VYYCARETRYGMDVWGQGTTVTVSS | |
| | HCDR1 | NYGIS | 1281 |
| | HCDR2 | WISAYNGNTKYPQKLQG | 1282 |
| | HCDR3 | ETRYGMDV | 1283 |
| | HFRW1 | QVQLVQSGAEVKKPGASVKVSCKASGYTFS | 1284 |
| | HFRW2 | WVRQAPGQGLEWMG | 1285 |
| | HFRW3 | RVTMSTDTSTSTAYMELRSLRSDDTAVYYCAR | 1286 |
| | HFRW4 | WGQGTTVTVSS | 1287 |
| | Light Chain | QPVLTQPPSASASLGASVTLTCTLSSGYSNYKVDWYQQRPGKGPQFV | 1288 |
| | | MRVGTGGIVGSKGDGIPDRFSVLGSGLNRYLTIKNIQEEDESDYHCGA | |
| | | DHGSGSNFVRVFGGGTKLTVLGQPKAAPSVTLFPPSSEELQANKATL | |
| | | VCLISDFYPGAVTVAWKADSSPVKAGVETTTPSKQSNNKYAASSYLS | |
| | | LTPEQWKSH | |
| | Light Chain | QPVLTQPPSASASLGASVTLTCTLSSGYSNYKVDWYQQRPGKGPQFV | 1289 |
| | Variable | MRVGTGGIVGSKGDGIPDRFSVLGSGLNRYLTIKNIQEEDESDYHCGA | |
| | Region | DHGSGSNFVRVFGGGTKLTVL | |
| | LCDR1 | TLSSGYSNYKVD | 1290 |
| | LCDR2 | VGTGGIVGSKGD | 1291 |
| | LCDR3 | GADHGSGSNFVRV | 1292 |
| | LFRW1 | QPVLTQPPSASASLGASVTLTC | 1293 |
| | LFRW2 | WYQQRPGKGPQFVMR | 1294 |
| | LFRW3 | GIPDRFSVLGSGLNRYLTIKNIQEEDESDYHC | 1295 |
| | LFRW4 | FGGGTKLTVL | 1296 |
| S144-1641 | Heavy Chain | EVQLVQSGAEVKKPGESLKISCKGSGYTFTSYWIGWVRQMPGKGLE | 1297 |
| (Spike/ | | WMGIIYLGDSDTRYSPSFQGQVTISADKSISTAYLQWNSLKASDTAM | |
| RBD) | | YYCARQVTGTTSWFDPWGQGTLVTVSSASTKGPSVFPLAPSSKSTSG | |
| | | GTAALGCLVKDYFPEPVTVSWNSGALTSGVHTFPAVLQSSG | |
| | Heavy Chain | EVQLVQSGAEVKKPGESLKISCKGSGYTFTSYWIGWVRQMPGKGLE | 1298 |
| | Variable | WMGIIYLGDSDTRYSPSFQGQVTISADKSISTAYLQWNSLKASDTAM | |
| | Region | YYCARQVTGTTSWFDPWGQGTLVTVSS | |
| | HCDR1 | SYWIG | 1299 |
| | HCDR2 | IIYLGDSDTRYSPSFQG | 1300 |
| | HCDR3 | QVTGTTSWFDP | 1301 |
| | HFRW1 | EVQLVQSGAEVKKPGESLKISCKGSGYTFT | 1302 |
| | HFRW2 | WVRQMPGKGLEWMG | 1303 |
| | HFRW3 | QVTISADKSISTAYLQWNSLKASDTAMYYCAR | 1304 |
| | HFRW4 | WGQGTLVTVSS | 1305 |
| | Light Chain | DIQMTQSPSTLSASVGERVTITCRASQSISRWLAWYQQKPGKAPKLLI | 1306 |
| | | YDASSLESGVPSRFSGSGSGTEFTLTISSLQPDDFATYHCHQYSTYSLT | |
| | | FGGGTKVDIKRTVAAPSVFIFPPSDEQLKSGTASVVCLLNNFYPREAK | |
| | | VQWKVDNALQSGNSQESVTEQDSKDSTYSLSSTLTLSKADYE | |
| | Light Chain | DIQMTQSPSTLSASVGERVTITCRASQSISRWLAWYQQKPGKAPKLLI | 1307 |
| | Variable | YDASSLESGVPSRFSGSGSGTEFTLTISSLQPDDFATYHCHQYSTYSLT | |
| | Region | FGGGTKVDIK | |
| | LCDR1 | RASQSISRWLA | 1308 |
| | LCDR2 | DASSLES | 1309 |
| | LCDR3 | HQYSTYSLT | 1310 |
| | LFRW1 | DIQMTQSPSTLSASVGERVTITC | 1311 |
| | LFRW2 | WYQQKPGKAPKLLIY | 1312 |
| | LFRW3 | GVPSRFSGSGSGTEFTLTISSLQPDDFATYHC | 1313 |
| | LFRW4 | FGGGTKVDIK | 1314 |
| S144-1827 | Heavy Chain | EVQLVESGGDVVQPGGSLRLSCAASGITFSNYWMTWVRQAPGKGLE | 1315 |
| (Spike/ | | WVATIKKDGGEQYYVDSVKGRFTISRDNARNSLYLQINSLRAEDTAV | |
| RBD) | | YYCARGGSSSSYYWIYWGQGTLVTVSSGSASAPTLFPLVSCENSPSDT | |
| | | SSV | |
| | Heavy Chain | EVQLVESGGDVVQPGGSLRLSCAASGITFSNYWMTWVRQAPGKGLE | 1316 |
| | Variable | WVATIKKDGGEQYYVDSVKGRFTISRDNARNSLYLQINSLRAEDTAV | |
| | Region | YYCARGGSSSSYYWIYWGQGTLVTVSS | |
| | HCDR1 | NYWMT | 1317 |
| | HCDR2 | TIKKDGGEQYYVDSVKG | 1318 |
| | HCDR3 | GGSSSSYYWIY | 1319 |
| | HFRW1 | EVQLVESGGDVVQPGGSLRLSCAASGITFS | 1320 |
| | HFRW2 | WVRQAPGKGLEWVA | 1321 |
| | HFRW3 | RFTISRDNARNSLYLQINSLRAEDTAVYYCAR | 1322 |
| | HFRW4 | WGQGTLVTVSS | 1323 |
| | Light Chain | EIVLTQSPGTLSLSPGERATLSCRASQSISNSYLVWYQQKPGQAPRLLI | 1324 |
| | | YGASTRATGIPDRFSGSGSGTDFTLTISRLEPEDFAVYYCQQYGSSPW | |
| | | TFGQGTTVEIKRTVAAPSVFIFPPSDEQLKSGTASVVCLLNNFYPREAK | |
| | | VQWKVDNALQSGNSQESVTEQDSKDSTYSLSSTLTLSKADYE | |
| | Light Chain | EIVLTQSPGTLSLSPGERATLSCRASQSISNSYLVWYQQKPGQAPRLLI | 1325 |
| | Variable | YGASTRATGIPDRFSGSGSGTDFTLTISRLEPEDFAVYYCQQYGSSPW | |
| | Region | TFGQGTTVEIK | |
| | LCDR1 | RASQSISNSYLV | 1326 |
| | LCDR2 | GASTRAT | 1327 |
| | LCDR3 | QQYGSSPWT | 1328 |
| | LFRW1 | EIVLTQSPGTLSLSPGERATLSC | 1329 |
| | LFRW2 | WYQQKPGQAPRLLIY | 1330 |
| | LFRW3 | GIPDRFSGSGSGTDFTLTISRLEPEDFAVYYC | 1331 |
| | LFRW4 | FGQGTTVEIK | 1332 |
| S144-1848 | Heavy Chain | EVQLVESGGGLVKPGGSLRLSCAASGFTFSSYSMNWVRQAPGKGLE | 1333 |
| (NP) | | WVSSISSSSSYIYYADSVKGRFTISRDNAKNSLYLQLNSLRAEDTAVY | |
| | | YCARDRDQLIFSAAFDIWGQGTMVTVSSASTKGPSVFPLAPSSKSTSG | |
| | | GTAALGCLVKDYFPEPVTVSWNSGALTSGVHTFPAVLQSSG | |
| | Heavy Chain | EVQLVESGGGLVKPGGSLRLSCAASGFTFSSYSMNWVRQAPGKGLE | 1334 |
| | Variable | WVSSISSSSSYIYYADSVKGRFTISRDNAKNSLYLQLNSLRAEDTAVY | |
| | Region | YCARDRDQLIFSAAFDIWGQGTMVTVSS | |
| | HCDR1 | SYSMN | 1335 |
| | HCDR2 | SISSSSSYIYYADSVKG | 1336 |
| | HCDR3 | DRDQLIFSAAFDI | 1337 |
| | HFRW1 | EVQLVESGGGLVKPGGSLRLSCAASGFTFS | 1338 |
| | HFRW2 | WVRQAPGKGLEWVS | 1339 |
| | HFRW3 | RFTISRDNAKNSLYLQLNSLRAEDTAVYYCAR | 1340 |
| | HFRW4 | WGQGTMVTVSS | 1341 |
| | Light Chain | QSVLTQPPSASGTPGQRVTISCSGSSSNIEHNYVFWYQQLPGTAPKLLI | 1342 |
| | | YSNNHRPSGVPDRFSGSKSGTSASLAISGLRSEDEADYYCAAWDASLS | |
| | | GPVVFAGGTKLTVLGQPKAAPSVTLFPPSSEELQANKATLVCLISDFY | |
| | | PGAVTVAWKADSSPVKAGVETTTPSKQSNNKYAASS | |
| | Light Chain | QSVLTQPPSASGTPGQRVTISCSGSSSNIEHNYVFWYQQLPGTAPKLLI | 1343 |
| | Variable | YSNNHRPSGVPDRFSGSKSGTSASLAISGLRSEDEADYYCAAWDASLS | |
| | Region | GPVVFAGGTKLTVL | |
| | LCDR1 | SGSSSNIEHNYVF | 1344 |
| | LCDR2 | SNNHRPS | 1345 |
| | LCDR3 | AAWDASLSGPVV | 1346 |
| | LFRW1 | QSVLTQPPSASGTPGQRVTISC | 1347 |
| | LFRW2 | WYQQLPGTAPKLLIY | 1348 |
| | LFRW3 | GVPDRFSGSKSGTSASLAISGLRSEDEADYYC | 1349 |
| | LFRW4 | FAGGTKLTVL | 1350 |
| S144-1850 | Heavy Chain | EVQLVESGGGLVQPGGSLRLSCAASGFTFSSYAMSWVRQAPGKGLE | 1351 |
| (Spike/ | | WVSAISGSGGSTYYADSVKGRFTISRANSKNTLYLQMNSLRAEDTAV | |
| RBD) | | YYCAKGPRFSRDYFDYWGQGTLVTVSSASTKGPSVFPLAPSSKSTSG | |
| | | GTAALGCLVKDYFPEPVTVSWNSGALTSGVHTFPAVLQSSG | |
| | Heavy Chain | EVQLVESGGGLVQPGGSLRLSCAASGFTFSSYAMSWVRQAPGKGLE | 1352 |
| | Variable | WVSAISGSGGSTYYADSVKGRFTISRANSKNTLYLQMNSLRAEDTAV | |
| | Region | YYCAKGPRFSRDYFDYWGQGTLVTVSS | |
| | HCDR1 | SYAMS | 1353 |
| | HCDR2 | AISGSGGSTYYADSVKG | 1354 |
| | HCDR3 | GPRFSRDYFDY | 1355 |
| | HFRW1 | EVQLVESGGGLVQPGGSLRLSCAASGFTFS | 1356 |
| | HFRW2 | WVRQAPGKGLEWVS | 1357 |
| | HFRW3 | RFTISRANSKNTLYLQMNSLRAEDTAVYYCAK | 1358 |
| | HFRW4 | WGQGTLVTVSS | 1359 |
| | Light Chain | DIQMTQSPSTLSASVGDRVTITCRASQSITSWLAWYQQKPGKAPKLLI | 1360 |
| | | YDASNLESGVPSRFSGSGSGTEFTLTISSLQPDDFATYYCQQYNNYLG | |
| | | TFGQGTKVEIKRTVAAPSVFIFPPSDEQLKSGTASVVCLLNNFYPREA | |
| | | KVQWKVDNALQSGNSQESVTEQDSKDSTYSLSSTLTLSKADYE | |
| | Light Chain | DIQMTQSPSTLSASVGDRVTITCRASQSITSWLAWYQQKPGKAPKLLI | 1361 |
| | Variable | YDASNLESGVPSRFSGSGSGTEFTLTISSLQPDDFATYYCQQYNNYLG | |
| | Region | TFGQGTKVEIK | |
| | LCDR1 | RASQSITSWLA | 1362 |
| | LCDR2 | DASNLES | 1363 |
| | LCDR3 | QQYNNYLGT | 1364 |
| | LFRW1 | DIQMTQSPSTLSASVGDRVTITC | 1365 |
| | LFRW2 | WYQQKPGKAPKLLIY | 1366 |
| | LFRW3 | GVPSRFSGSGSGTEFTLTISSLQPDDFATYYC | 1367 |
| | LFRW4 | FGQGTKVEIK | 1368 |
| S144-2234 | Heavy Chain | QVQLVQSGAEVKKPGSSVKVSCKASGGTFSRYTISWVRQAPGQGLE | 1369 |
| (ORF8) | | WMGRIIPILGTANYAQNFQGRVTITADKSTSTAYMELSSLRSEDTAVY | |
| | | YCARHGYSYGPFDYWGQGTLVTVSSASTKGPSVFPLAPSSKSTSGGT | |
| | | AALGCLVKDYFPEPVTVSWNSGALTSGVHTFPAVLQSSG | |
| | Heavy Chain | QVQLVQSGAEVKKPGSSVKVSCKASGGTFSRYTISWVRQAPGQGLE | 1370 |
| | Variable | WMGRIIPILGTANYAQNFQGRVTITADKSTSTAYMELSSLRSEDTAVY | |
| | Region | YCARHGYSYGPFDYWGQGTLVTVSS | |
| | HCDR1 | RYTIS | 1371 |
| | HCDR2 | RIIPILGTANYAQNFQG | 1372 |
| | HCDR3 | HGYSYGPFDY | 1373 |
| | HFRW1 | QVQLVQSGAEVKKPGSSVKVSCKASGGTFS | 1374 |
| | HFRW2 | WVRQAPGQGLEWMG | 1375 |
| | HFRW3 | RVTITADKSTSTAYMELSSLRSEDTAVYYCAR | 1376 |
| | HFRW4 | WGQGTLVTVSS | 1377 |
| | Light Chain | DIVMTQSPDSLTVSLGERATINCKSSQSVLYSSNNKNYLAWYQQKPG | 1378 |
| | | QPPKLLIYWASTRESGVPDRFSGSGSGTDFTLTVSSLQAEDVAVYYCQ | |
| | | QYYSTPGTFGQGTKVEIKRTVAAPSVFIFPPSDEQLKSGTASVVCLLN | |
| | | NFYPREAKVQWKVDNALQSGNSQESVTEQDSKDSTYSLSSTLTLSKA | |
| | | DYE | |
| | Light Chain | DIVMTQSPDSLTVSLGERATINCKSSQSVLYSSNNKNYLAWYQQKPG | 1379 |
| | Variable | QPPKLLIYWASTRESGVPDRFSGSGSGTDFTLTVSSLQAEDVAVYYCQ | |
| | Region | QYYSTPGTFGQGTKVEIK | |
| | LCDR1 | KSSQSVLYSSNNKNYLA | 1380 |
| | LCDR2 | WASTRES | 1381 |
| | LCDR3 | QQYYSTPGT | 1382 |
| | LFRW1 | DIVMTQSPDSLTVSLGERATINC | 1383 |
| | LFRW2 | WYQQKPGQPPKLLIY | 1384 |
| | LFRW3 | GVPDRFSGSGSGTDFTLTVSSLQAEDVAVYYC | 1385 |
| | LFRW4 | FGQGTKVEIK | 1386 |
| S564-105 | Heavy Chain | QVRLQESGPGLVKPSQTLSLTCTVSGGSISSGSYYWSWIRQPAGKGLE | 1387 |
| (NP) | | WIGRFHTSGSTNYNPSLKSRVTISVDTSKNQFSLKLSSVTAADTAVYY | |
| | | CARDLKGKTWIQTPFDYWGQGILVTVSSASTKGPSVFPLAPSSKSTSG | |
| | | GTAALGCLVKDYFPEPVTVSWNSGALTSGVHTFPAVLQSSG | |
| | Heavy Chain | QVRLQESGPGLVKPSQTLSLTCTVSGGSISSGSYYWSWIRQPAGKGLE | 1388 |
| | Variable | WIGRFHTSGSTNYNPSLKSRVTISVDTSKNQFSLKLSSVTAADTAVYY | |
| | Region | CARDLKGKTWIQTPFDYWGQGILVTVSS | |
| | HCDR1 | SGSYYWS | 1389 |
| | HCDR2 | RFHTSGSTNYNPSLKS | 1390 |
| | HCDR3 | DLKGKTWIQTPFDY | 1391 |
| | HFRW1 | QVRLQESGPGLVKPSQTLSLTCTVSGGSIS | 1392 |
| | HFRW2 | WIRQPAGKGLEWIG | 1393 |
| | HFRW3 | RVTISVDTSKNQFSLKLSSVTAADTAVYYCAR | 1394 |
| | HFRW4 | WGQGILVTVSS | 1395 |
| | Light Chain | QSALTQPASVSGSPGQSITISCTGTSSDVGAYNYVSWYQQHPGKAPKL | 1396 |
| | | MIYEVSNRPSGVSNRFSGSKSGNTASLTISGLQAEDEADYYCSSYTSST | |
| | | FFGTGTTVTVLGQPKANPTVTLFPPSSEELQANKATLVCLISDFYPGA | |
| | | VTVAWKADGSPVKAGVETTTPSKQSNNKYAASSY | |
| | Light Chain | QSALTQPASVSGSPGQSITISCTGTSSDVGAYNYVSWYQQHPGKAPKL | 1397 |
| | Variable | MIYEVSNRPSGVSNRFSGSKSGNTASLTISGLQAEDEADYYCSSYTSST | |
| | Region | FFGTGTTVTVL | |
| | LCDR1 | TGTSSDVGAYNYVS | 1398 |
| | LCDR2 | EVSNRPS | 1399 |
| | LCDR3 | SSYTSSTF | 1400 |
| | LFRW1 | QSALTQPASVSGSPGQSITISC | 1401 |
| | LFRW2 | WYQQHPGKAPKLMIY | 1402 |
| | LFRW3 | GVSNRFSGSKSGNTASLTISGLQAEDEADYYC | 1403 |
| | LFRW4 | FGTGTTVTVL | 1404 |
| S564-14 | Heavy Chain | EVQLVESGGGLVQPGGSLRLSCAASGLTFSSYWMSWARQAPGKGLE | 1405 |
| (Spike/ | | WVANIKKDGSEKYYVDSVKGRFTISRDNAKNSLYLQMNSLRVEDTA | |
| RBD) | | VYYCASEPPHYGGNSGAEYFQHWGQGTLVTVSSAPTKAPDVFPIISG | |
| | | CRHPKDNSPVVLACLITGYH | |
| | Heavy Chain | EVQLVESGGGLVQPGGSLRLSCAASGLTFSSYWMSWARQAPGKGLE | 1406 |
| | Variable | WVANIKKDGSEKYYVDSVKGRFTISRDNAKNSLYLQMNSLRVEDTA | |
| | Region | VYYCASEPPHYGGNSGAEYFQHWGQGTLVTVSS | |
| | HCDR1 | SYWMS | 1407 |
| | HCDR2 | NIKKDGSEKYYVDSVKG | 1408 |
| | HCDR3 | EPPHYGGNSGAEYFQH | 1409 |
| | HFRW1 | EVQLVESGGGLVQPGGSLRLSCAASGLTFS | 1410 |
| | HFRW2 | WARQAPGKGLEWVA | 1411 |
| | HFRW3 | RFTISRDNAKNSLYLQMNSLRVEDTAVYYCAS | 1412 |
| | HFRW4 | WGQGTLVTVSS | 1413 |
| | Light Chain | SYVLTQPPSVSVAPGKTARITCGGNNIGSKSVHWYQQRPGQAPVLVI | 1414 |
| | | YYDSDRPSGIPERFSGSNSGNTATLTISRVEAGDEADYYCQVWDSSSD | |
| | | HHYVFGTGTKVTVLGQPKANPTVTLFPPSSEELQANKATLVCLISDFY | |
| | | PGAVTVAWKADSSPVKAGVETTKPSKQSNNKYAASS | |
| | Light Chain | SYVLTQPPSVSVAPGKTARITCGGNNIGSKSVHWYQQRPGQAPVLVI | 1415 |
| | Variable | YYDSDRPSGIPERFSGSNSGNTATLTISRVEAGDEADYYCQVWDSSSD | |
| | Region | HHYVFGTGTKVTVL | |
| | LCDR1 | GGNNIGSKSVH | 1416 |
| | LCDR2 | YDSDRPS | 1417 |
| | LCDR3 | QVWDSSSDHHYV | 1418 |
| | LFRW1 | SYVLTQPPSVSVAPGKTARITC | 1419 |
| | LFRW2 | WYQQRPGQAPVLVIY | 1420 |
| | LFRW3 | GIPERFSGSNSGNTATLTISRVEAGDEADYYC | 1421 |
| | LFRW4 | FGTGTKVTVL | 1422 |
| S564-68 | Heavy Chain | QVQLVQSGAEVKKPGASVKVSCKASGYIFTGYYMHWVRQAPGQGL | 1423 |
| (Spike/ | | EWMGWINPNSGGTNYAQKFQGRVTMTRDTSITTAYMELSRLRSDDT | |
| RBD) | | AFYYCARVKRFSIFGVELDYWGQGTLVTVSSASTKGPSVFPLAPSSKS | |
| | | TSGGTAALGCLVKDYFPEPVTVSWNSGALTSGVHTFPAVLQSSG | |
| | Heavy Chain | QVQLVQSGAEVKKPGASVKVSCKASGYIFTGYYMHWVRQAPGQGL | 1424 |
| | Variable | EWMGWINPNSGGTNYAQKFQGRVTMTRDTSITTAYMELSRLRSDDT | |
| | Region | AFYYCARVKRFSIFGVELDYWGQGTLVTVSS | |
| | HCDR1 | GYYMH | 1425 |
| | HCDR2 | WINPNSGGTNYAQKFQG | 1426 |
| | HCDR3 | VKRFSIFGVELDY | 1427 |
| | HFRW1 | QVQLVQSGAEVKKPGASVKVSCKASGYIFT | 1428 |
| | HFRW2 | WVRQAPGQGLEWMG | 1429 |
| | HFRW3 | RVTMTRDTSITTAYMELSRLRSDDTAFYYCAR | 1430 |
| | HFRW4 | WGQGTLVTVSS | 1431 |
| | Light Chain | QSALTQPPSASGSPGQSVTISCTGTSSDVGGYNYVSWYQQHPGKAPK | 1432 |
| | | LMIYEVSKRPSGVPDRFSGSKSGNTASLTVSGLQAEDEADYFCSSYAD | |
| | | SNNLVFGGGTKLTVLGQPKAAPSVTLFPPSSEELQANKATLVCLISDF | |
| | | CPGAVTVAWKADSSPVKAGVETTTPSKQSNNKYAASSY | |
| | Light Chain | QSALTQPPSASGSPGQSVTISCTGTSSDVGGYNYVSWYQQHPGKAPK | 1433 |
| | Variable | LMIYEVSKRPSGVPDRFSGSKSGNTASLTVSGLQAEDEADYFCSSYAD | |
| | Region | SNNLVFGGGTKLTVL | |
| | LCDR1 | TGTSSDVGGYNYVS | 1434 |
| | LCDR2 | EVSKRPS | 1435 |
| | LCDR3 | SSYADSNNLV | 1436 |
| | LFRW1 | QSALTQPPSASGSPGQSVTISC | 1437 |
| | LFRW2 | WYQQHPGKAPKLMIY | 1438 |
| | LFRW3 | GVPDRFSGSKSGNTASLTVSGLQAEDEADYFC | 1439 |
| | LFRW4 | FGGGTKLTVL | 1440 |
| S564-98 | Heavy Chain | QVQLQESGPGLVKPSETLSLTCTVSGGSISSYYWSWIRQPPGKGLEWI | 1441 |
| (NP) | | GYIYYSGSTNYNPSLKSRVTISVDTSKNQFSLKLSSVTAADTAVYYCA | |
| | | RHQSRWNIVATMDFDYWGQGTLVTVSSASTKGPSVFPL | |
| | Heavy Chain | QVQLQESGPGLVKPSETLSLTCTVSGGSISSYYWSWIRQPPGKGLEWI | 1442 |
| | Variable | GYIYYSGSTNYNPSLKSRVTISVDTSKNQFSLKLSSVTAADTAVYYCA | |
| | Region | RHQSRWNIVATMDFDYWGQGTLVTVSS | |
| | HCDR1 | SYYWS | 1443 |
| | HCDR2 | YIYYSGSTNYNPSLKS | 1444 |
| | HCDR3 | HQSRWNIVATMDFDY | 1445 |
| | HFRW1 | QVQLQESGPGLVKPSETLSLTCTVSGGSIS | 1446 |
| | HFRW2 | WIRQPPGKGLEWIG | 1447 |
| | HFRW3 | RVTISVDTSKNQFSLKLSSVTAADTAVYYCAR | 1448 |
| | HFRW4 | WGQGTLVTVSS | 1449 |
| | Light Chain | DIQMTQSPSSLSASVGDRVTITCRASQSIRSYLNWYQQKPGKAPKLLI | 1450 |
| | | YAASSLQSGVPSRFSGSGSGTDFTLTIGSLQPEDFATYYCQQSYSTSVA | |
| | | FGQGTKVEIKRTVAAPSVFIFPPSDEQLKSGTASVVCLLNNFYPREAK | |
| | | VQWKVDNALQSGNSQESVTEQDSKDSTYSLSSTLTLSKADYE | |
| | Light Chain | DIQMTQSPSSLSASVGDRVTITCRASQSIRSYLNWYQQKPGKAPKLLI | 1451 |
| | Variable | YAASSLQSGVPSRFSGSGSGTDFTLTIGSLQPEDFATYYCQQSYSTSVA | |
| | Region | FGQGTKVEIK | |
| | LCDR1 | RASQSIRSYLN | 1452 |
| | LCDR2 | AASSLQS | 1453 |
| | LCDR3 | QQSYSTSVA | 1454 |
| | LFRW1 | DIQMTQSPSSLSASVGDRVTITC | 1455 |
| | LFRW2 | WYQQKPGKAPKLLIY | 1456 |
| | LFRW3 | GVPSRFSGSGSGTDFTLTIGSLQPEDFATYYC | 1457 |
| | LFRW4 | FGQGTKVEIK | 1458 |
| S564-105 | Heavy Chain | QVRLQESGPGLVKPSQTLSLTCTVSGGSISSGSYYWSWIRQPAGKGLE | 1459 |
| (NP) | | WIGRFHTSGSTNYNPSLKSRVTISVDTSKNQFSLKLSSVTAADTAVYY | |
| | | CARDLKGKTWIQTPFDYWGQGILVTVSSASTKGPSVFPLAPSSKSTSG | |
| | | GTAALGCLVKDYFPEPVTVSWNSGALTSGVHTFPAVLQSSG | |
| | Heavy Chain | QVRLQESGPGLVKPSQTLSLTCTVSGGSISSGSYYWSWIRQPAGKGLE | 1460 |
| | Variable | WIGRFHTSGSTNYNPSLKSRVTISVDTSKNQFSLKLSSVTAADTAVYY | |
| | Region | CARDLKGKTWIQTPFDYWGQGILVTVSS | |
| | HCDR1 | SGSYYWS | 1461 |
| | HCDR2 | RFHTSGSTNYNPSLKS | 1462 |
| | HCDR3 | DLKGKTWIQTPFDY | 1463 |
| | HFRW1 | QVRLQESGPGLVKPSQTLSLTCTVSGGSIS | 1464 |
| | HFRW2 | WIRQPAGKGLEWIG | 1465 |
| | HFRW3 | RVTISVDTSKNQFSLKLSSVTAADTAVYYCAR | 1466 |
| | HFRW4 | WGQGILVTVSS | 1467 |
| | Light Chain | QSALTQPASVSGSPGQSITISCTGTSSDVGAYNYVSWYQQHPGKAPKL | 1468 |
| | | MIYEVSNRPSGVSNRFSGSKSGNTASLTISGLQAEDEADYYCSSYTSST | |
| | | FFGTGTTVTVLGQPKANPTVTLFPPSSEELQANKATLVCLISDFYPGA | |
| | | VTVAWKADGSPVKAGVETTTPSKQSNNKYAASSY | |
| | Light Chain | QSALTQPASVSGSPGQSITISCTGTSSDVGAYNYVSWYQQHPGKAPKL | 1469 |
| | Variable | MIYEVSNRPSGVSNRFSGSKSGNTASLTISGLQAEDEADYYCSSYTSST | |
| | Region | FFGTGTTVTVL | |
| | LCDR1 | TGTSSDVGAYNYVS | 1470 |
| | LCDR2 | EVSNRPS | 1471 |
| | LCDR3 | SSYTSSTF | 1472 |
| | LFRW1 | QSALTQPASVSGSPGQSITISC | 1473 |
| | LFRW2 | WYQQHPGKAPKLMIY | 1474 |
| | LFRW3 | GVSNRFSGSKSGNTASLTISGLQAEDEADYYC | 1475 |
| | LFRW4 | FGTGTTVTVL | 1476 |
| S564-134 | Heavy Chain | QVQLVQSGAEVKKPGASVKVSCKASGYTFTGYYMHWVRQAPGQGL | 1477 |
| (Spike/ | | EWMGWINPNSGGTNYAQKFQGRVTMTRDTSINTAYMELSRLRSDDT | |
| RBD) | | AVYYCTRVGRFSIFGVELDYWGQGTLVTVSSASTKGPSVFPLAPSSKS | |
| | | TSGGTAALGCLVKDYFPEPVTVSWNSGALTSGVHTFPAVLQSSG | |
| | Heavy Chain | QVQLVQSGAEVKKPGASVKVSCKASGYTFTGYYMHWVRQAPGQGL | 1478 |
| | Variable | EWMGWINPNSGGTNYAQKFQGRVTMTRDTSINTAYMELSRLRSDDT | |
| | Region | AVYYCTRVGRFSIFGVELDYWGQGTLVTVSS | |
| | HCDR1 | GYYMH | 1479 |
| | HCDR2 | WINPNSGGTNYAQKFQG | 1480 |
| | HCDR3 | VGRFSIFGVELDY | 1481 |
| | HFRW1 | QVQLVQSGAEVKKPGASVKVSCKASGYTFT | 1482 |
| | HFRW2 | WVRQAPGQGLEWMG | 1483 |
| | HFRW3 | RVTMTRDTSINTAYMELSRLRSDDTAVYYCTR | 1484 |
| | HFRW4 | WGQGTLVTVSS | 1485 |
| | Light Chain | QSALTQPPSASGSPGQSVTISCTGTSSDVGGYNYVSWYQQHPGKAPK | 1486 |
| | | LMIYEVNKRPSGVPDRFSGSKSGNTASLTVSGLQADDEADYYCSSYA | |
| | | GSNNLVFGGGTKLTVLGQPKAAPSVTLFPPSSEELQANKATLVCLISD | |
| | | FYPGAVTVAWKADSSPVKAGVETTTPSKQSNNKYAASS | |
| | Light Chain | QSALTQPPSASGSPGQSVTISCTGTSSDVGGYNYVSWYQQHPGKAPK | 1487 |
| | Variable | LMIYEVNKRPSGVPDRFSGSKSGNTASLTVSGLQADDEADYYCSSYA | |
| | Region | GSNNLVFGGGTKLTVL | |
| | LCDR1 | TGTSSDVGGYNYVS | 1488 |
| | LCDR2 | EVNKRPS | 1489 |
| | LCDR3 | SSYAGSNNLV | 1490 |
| | LFRW1 | QSALTQPPSASGSPGQSVTISC | 1491 |
| | LFRW2 | WYQQHPGKAPKLMIY | 1492 |
| | LFRW3 | GVPDRFSGSKSGNTASLTVSGLQADDEADYYC | 1493 |
| | LFRW4 | FGGGTKLTVL | 1494 |
| S564-138 | Heavy Chain | QVLLVQSGAEVKKPGASVKVSCKASGYTFTGYYLHWVRQAPGQGLE | 1495 |
| (Spike/ | | WMGWINPISGGTNYAQNFQDRVTMTRDTSIITAYMELSRLRSDDTAV | |
| RBD) | | YYCARLAYYYDSSAYRGAFDIWGQGTMVTVSSASTKGPSVFPLAPSS | |
| | | KSTSGGTAALGCLVKDYFPEPVTVSWNSGALTSGVHTFPAVLQSS | |
| | Heavy Chain | QVLLVQSGAEVKKPGASVKVSCKASGYTFTGYYLHWVRQAPGQGLE | 1496 |
| | Variable | WMGWINPISGGTNYAQNFQDRVTMTRDTSIITAYMELSRLRSDDTAV | |
| | Region | YYCARLAYYYDSSAYRGAFDIWGQGTMVTVSS | |
| | HCDR1 | GYYLH | 1497 |
| | HCDR2 | WINPISGGTNYAQNFQD | 1498 |
| | HCDR3 | LAYYYDSSAYRGAFDI | 1499 |
| | HFRW1 | QVLLVQSGAEVKKPGASVKVSCKASGYTFT | 1500 |
| | HFRW2 | WVRQAPGQGLEWMG | 1501 |
| | HFRW3 | RVTMTRDTSIITAYMELSRLRSDDTAVYYCAR | 1502 |
| | HFRW4 | WGQGTMVTVSS | 1503 |
| | Light Chain | QSALTQPASVSGSPGQSITISCTGTSSDVGGYNYVSWYQQHPGKAPKL | 1504 |
| | | MIYEVSNRPSGVSDRFSGSKSGNTASLTISGLQAEDEADYYCSSYTSSS | |
| | | TYVFGTGTKVTVLGQPKANPTVTLFPPSSEELQANKATLVCLISDFYP | |
| | | GAVTVAWKADGSPVKAGVETTKPSKQSNNKYAASS | |
| | Light Chain | QSALTQPASVSGSPGQSITISCTGTSSDVGGYNYVSWYQQHPGKAPKL | 1505 |
| | Variable | MIYEVSNRPSGVSDRFSGSKSGNTASLTISGLQAEDEADYYCSSYTSSS | |
| | Region | TYVFGTGTKVTVL | |
| | LCDR1 | TGTSSDVGGYNYVS | 1506 |
| | LCDR2 | EVSNRPS | 1507 |
| | LCDR3 | SSYTSSSTYV | 1508 |
| | LFRW1 | QSALTQPASVSGSPGQSITISC | 1509 |
| | LFRW2 | WYQQHPGKAPKLMIY | 1510 |
| | LFRW3 | GVSDRFSGSKSGNTASLTISGLQAEDEADYYC | 1511 |
| | LFRW4 | FGTGTKVTVL | 1512 |
| S564-152 | Heavy Chain | QVQLVESGGGVVQPGRSLRLSCAASGFTFSYYGMHWVRQAPGKGLE | 1513 |
| (Spike/ | | WVAVIWYDGSNKHYADSVKGRFTISRDNSKNTLYLQMNSLRAEDTA | |
| RBD) | | VYYCAKNAAPYCSGGSCYGTYFDYWGQGTLVTVSSASTKGPSVFPL | |
| | | APSSKSTSGGTAALGCLVKDYFPEPVTVSWNSGALTSGVHTFPAVLQ | |
| | | SSG | |
| | Heavy Chain | QVQLVESGGGVVQPGRSLRLSCAASGFTFSYYGMHWVRQAPGKGLE | 1514 |
| | Variable | WVAVIWYDGSNKHYADSVKGRFTISRDNSKNTLYLQMNSLRAEDTA | |
| | Region | VYYCAKNAAPYCSGGSCYGTYFDYWGQGTLVTVSS | |
| | HCDR1 | YYGMH | 1515 |
| | HCDR2 | VIWYDGSNKHYADSVKG | 1516 |
| | HCDR3 | NAAPYCSGGSCYGTYFDY | 1517 |
| | HFRW1 | QVQLVESGGGVVQPGRSLRLSCAASGFTFS | 1518 |
| | HFRW2 | WVRQAPGKGLEWVA | 1519 |
| | HFRW3 | RFTISRDNSKNTLYLQMNSLRAEDTAVYYCAK | 1520 |
| | HFRW4 | WGQGTLVTVSS | 1521 |
| | Light Chain | DIQMTQSPSSLSASVGDRVTITCQASQDINNYLNWYQQKPGKAPKLLI | 1522 |
| | | YDASNLETGVPSRFSGSGSGTDFTFTISSLQPEDIATYYCQQYDNVPPH | |
| | | TFGQGTKLEIKRTVAAPSVFIFPPSDEQLKSGTASVVCLLNNFYPREAK | |
| | | VQWKVDNALQSGNSQESVTEQDSKDSTYSLSSTLTLSKADYE | |
| | Light Chain | DIQMTQSPSSLSASVGDRVTITCQASQDINNYLNWYQQKPGKAPKLLI | 1523 |
| | Variable | YDASNLETGVPSRFSGSGSGTDFTFTISSLQPEDIATYYCQQYDNVPPH | |
| | Region | TFGQGTKLEIK | |
| | LCDR1 | QASQDINNYLN | 1524 |
| | LCDR2 | DASNLET | 1525 |
| | LCDR3 | QQYDNVPPHT | 1526 |
| | LFRW1 | DIQMTQSPSSLSASVGDRVTITC | 1527 |
| | LFRW2 | WYQQKPGKAPKLLIY | 1528 |
| | LFRW3 | GVPSRFSGSGSGTDFTFTISSLQPEDIATYYC | 1529 |
| | LFRW4 | FGQGTKLEIK | 1530 |
| S564-218 | Heavy Chain | QVQLVQSGAEVKKPGSSVKVSCKASGGTFSSYAISWVRQAPGQGLE | 1531 |
| (Spike/ | | WMGGIIPIFGTAKYAQKFQGRVTITADESTSTAYMELSSLRSEDTAVY | |
| RBD) | | YCARGKDGYNPWGAFDIWGQGTMVTVSSGSASAPTLFPLVSCENSPS | |
| | | DTSSV | |
| | Heavy Chain | QVQLVQSGAEVKKPGSSVKVSCKASGGTFSSYAISWVRQAPGQGLE | 1532 |
| | Variable | WMGGIIPIFGTAKYAQKFQGRVTITADESTSTAYMELSSLRSEDTAVY | |
| | Region | YCARGKDGYNPWGAFDIWGQGTMVTVSS | |
| | HCDR1 | SYAIS | 1533 |
| | HCDR2 | GIIPIFGTAKYAQKFQG | 1534 |
| | HCDR3 | GKDGYNPWGAFDI | 1535 |
| | HFRW1 | QVQLVQSGAEVKKPGSSVKVSCKASGGTFS | 1536 |
| | HFRW2 | WVRQAPGQGLEWMG | 1537 |
| | HFRW3 | RVTITADESTSTAYMELSSLRSEDTAVYYCAR | 1538 |
| | HFRW4 | WGQGTMVTVSS | 1539 |
| | Light Chain | QSALTQPPSASGSPGQSVTISCTGTSSDVGGYNYVSWYQQHPGKAPK | 1540 |
| | | LMIYEVSKRPSGVPDRFSGSKSGNTASLTVSGLQAEDEADYYCSSYA | |
| | | GSNNFGVFGGGTKLTVLGQPKAAPSVTLFPPSSEELQANKATLVCLIS | |
| | | DFYPGAVTVAWKADSSPVKAGVETTTPSKQSNNKYAASSYLSLTPEQ | |
| | | WKSH | |
| | Light Chain | QSALTQPPSASGSPGQSVTISCTGTSSDVGGYNYVSWYQQHPGKAPK | 1541 |
| | Variable | LMIYEVSKRPSGVPDRFSGSKSGNTASLTVSGLQAEDEADYYCSSYA | |
| | Region | GSNNFGVFGGGTKLTVL | |
| | LCDR1 | TGTSSDVGGYNYVS | 1542 |
| | LCDR2 | EVSKRPS | 1543 |
| | LCDR3 | SSYAGSNNFGV | 1544 |
| | LFRW1 | QSALTQPPSASGSPGQSVTISC | 1545 |
| | LFRW2 | WYQQHPGKAPKLMIY | 1546 |
| | LFRW3 | GVPDRFSGSKSGNTASLTVSGLQAEDEADYYC | 1547 |
| | LFRW4 | FGGGTKLTVL | 1548 |
| S564-249 | Heavy Chain | EVQLVESGGGLVQPGGSLRLSCVASGFTFSDYAMHWVRQAPGKGLE | 1549 |
| (NP) | | YIAAISSNGGRTYYADSVKDKFTISRDNSKNILYLHMGSLRAEDTAVY | |
| | | FCARDPQSWVTSTTAHFQHWGQGTLVTVSSASPTSPKVFPLSLCSTQP | |
| | | DGNVVIACLVQGFFPQEPLSVTWSESGQGVTARNF | |
| | Heavy Chain | EVQLVESGGGLVQPGGSLRLSCVASGFTFSDYAMHWVRQAPGKGLE | 1550 |
| | Variable | YIAAISSNGGRTYYADSVKDKFTISRDNSKNILYLHMGSLRAEDTAVY | |
| | Region | FCARDPQSWVTSTTAHFQHWGQGTLVTVSS | |
| | HCDR1 | DYAMH | 1551 |
| | HCDR2 | AISSNGGRTYYADSVKD | 1552 |
| | HCDR3 | DPQSWVTSTTAHFQH | 1553 |
| | HFRW1 | EVQLVESGGGLVQPGGSLRLSCVASGFTFS | 1554 |
| | HFRW2 | WVRQAPGKGLEYIA | 1555 |
| | HFRW3 | KFTISRDNSKNILYLHMGSLRAEDTAVYFCAR | 1556 |
| | HFRW4 | WGQGTLVTVSS | 1557 |
| | Light Chain | QSALTQPASVSGSPGQSITISCTGTSSDIGGYNYVSWYQQHPGKAPKLI | 1558 |
| | | ISDVSNRPSGVSSRFSGSKSGNTASLTISGLQTEDEAHYYCSSFRSGITL | |
| | | GVFGGGTKLTVLGQPKAAPSVTLFPPSSEELQANKATLVCLISDFYPG | |
| | | AVTVAWKADSSPVKAGVETTTPSKQSNNKYAASS | |
| | Light Chain | QSALTQPASVSGSPGQSITISCTGTSSDIGGYNYVSWYQQHPGKAPKLI | 1559 |
| | Variable | ISDVSNRPSGVSSRFSGSKSGNTASLTISGLQTEDEAHYYCSSFRSGITL | |
| | Region | GVFGGGTKLTVL | |
| | LCDR1 | TGTSSDIGGYNYVS | 1560 |
| | LCDR2 | DVSNRPS | 1561 |
| | LCDR3 | SSFRSGITLGV | 1562 |
| | LFRW1 | QSALTQPASVSGSPGQSITISC | 1563 |
| | LFRW2 | WYQQHPGKAPKLIIS | 1564 |
| | LFRW3 | GVSSRFSGSKSGNTASLTISGLQTEDEAHYYC | 1565 |
| | LFRW4 | FGGGTKLTVL | 1566 |
| S564-265 | Heavy Chain | QVQLVQSGAEVKKPGASVKVSCKASGYTFTGYYMHWVRQAPGQGL | 1567 |
| (Spike/ | | EWMGWINPNSGAINYAQKFQGRVTMTRDTSISTAYMELSSLRSDDTA | |
| RBD) | | VYYCARVGRFSIFGVELDNWGQGTLVTVSSASTKGPSVFPLAPSSKST | |
| | | SGGTAALGCLVKDYFPEPVTVSWNSGALTSGVHTFPAVLQSSG | |
| | Heavy Chain | QVQLVQSGAEVKKPGASVKVSCKASGYTFTGYYMHWVRQAPGQGL | 1568 |
| | Variable | EWMGWINPNSGAINYAQKFQGRVTMTRDTSISTAYMELSSLRSDDTA | |
| | Region | VYYCARVGRFSIFGVELDNWGQGTLVTVSS | |
| | HCDR1 | GYYMH | 1569 |
| | HCDR2 | WINPNSGAINYAQKFQG | 1570 |
| | HCDR3 | VGRFSIFGVELDN | 1571 |
| | HFRW1 | QVQLVQSGAEVKKPGASVKVSCKASGYTFT | 1572 |
| | HFRW2 | WVRQAPGQGLEWMG | 1573 |
| | HFRW3 | RVTMTRDTSISTAYMELSSLRSDDTAVYYCAR | 1574 |
| | HFRW4 | WGQGTLVTVSS | 1575 |
| | Light Chain | QSALTQPPSASGSPGQSVTISCTGTSSDVGGYNFVSWYQQHPGKAPKL | 1576 |
| | | MIYEVSKRPSGVPDRFSGSKSGNTASLTVSGLQAEDEADYYCSSYGG | |
| | | SNNLIFGGGTRLTVLGQPKAAPSVTLFPPSSEELQANKATLVCLISDFY | |
| | | PGAVTVAWKADSSPVKAGVETTTPSKQSNNKYAASSYLSLTPEQWK | |
| | | SH | |
| | Light Chain | QSALTQPPSASGSPGQSVTISCTGTSSDVGGYNFVSWYQQHPGKAPKL | 1577 |
| | Variable | MIYEVSKRPSGVPDRFSGSKSGNTASLTVSGLQAEDEADYYCSSYGG | |
| | Region | SNNLIFGGGTRLTVL | |
| | LCDR1 | TGTSSDVGGYNFVS | 1578 |
| | LCDR2 | EVSKRPS | 1579 |
| | LCDR3 | SSYGGSNNLI | 1580 |
| | LFRW1 | QSALTQPPSASGSPGQSVTISC | 1581 |
| | LFRW2 | WYQQHPGKAPKLMIY | 1582 |
| | LFRW3 | GVPDRFSGSKSGNTASLTVSGLQAEDEADYYC | 1583 |
| | LFRW4 | FGGGTRLTVL | 1584 |
| S564-275 | Heavy Chain | QVQLQESGPGLVKPSETLSLTCTVSGGSISSYYWSWIRQPPGKGLEWI | 1585 |
| (NP) | | GYIYYSGSTKYNPSLKSRVTISVDTSKKQFSLKLSSVTAADTAVYYCA | |
| | | RHIKIGVVGGLTFDFWGQGTLVTVSSGSASAPTLFPLVSCENSPSDTSS | |
| | | V | |
| | Heavy Chain | QVQLQESGPGLVKPSETLSLTCTVSGGSISSYYWSWIRQPPGKGLEWI | 1586 |
| | Variable | GYIYYSGSTKYNPSLKSRVTISVDTSKKQFSLKLSSVTAADTAVYYCA | |
| | Region | RHIKIGVVGGLTFDFWGQGTLVTVSS | |
| | HCDR1 | SYYWS | 1587 |
| | HCDR2 | YIYYSGSTKYNPSLKS | 1588 |
| | HCDR3 | HIKIGVVGGLTFDF | 1589 |
| | HFRW1 | QVQLQESGPGLVKPSETLSLTCTVSGGSIS | 1590 |
| | HFRW2 | WIRQPPGKGLEWIG | 1591 |
| | HFRW3 | RVTISVDTSKKQFSLKLSSVTAADTAVYYCAR | 1592 |
| | HFRW4 | WGQGTLVTVSS | 1593 |
| | Light Chain | DIQMTQSPSSLSASIGDRVTITCRASQSISTYLNWYQQKPGKAPKLLIY | 1594 |
| | | AASSLQSGVPSRFSGSGSGADFTLTISSLQPEDFATYYCQQSYSTPLTF | |
| | | GGGTKVEIKRTVAAPSVFIFPPSDEQLKSGTASVVCLLNNFYPREAKV | |
| | | QWKVDNA | |
| | Light Chain | DIQMTQSPSSLSASIGDRVTITCRASQSISTYLNWYQQKPGKAPKLLIY | 1595 |
| | Variable | AASSLQSGVPSRFSGSGSGADFTLTISSLQPEDFATYYCQQSYSTPLTF | |
| | Region | GGGTKVEIK | |
| | LCDR1 | RASQSISTYLN | 1596 |
| | LCDR2 | AASSLQS | 1597 |
| | LCDR3 | QQSYSTPLT | 1598 |
| | LFRW1 | DIQMTQSPSSLSASIGDRVTITC | 1599 |
| | LFRW2 | WYQQKPGKAPKLLIY | 1600 |
| | LFRW3 | GVPSRFSGSGSGADFTLTISSLQPEDFATYYC | 1601 |
| | LFRW4 | FGGGTKVEIK | 1602 |
| S564-287 | Heavy Chain | QVQLVQSGAEVKKPGASVKVSCKASGYTFTGYYMHWVRQAPGQGL | 1603 |
| (ORF8) | | EWMGWINPNSGGTNYAQKFQGRVTMTRDTSISTAYMELSRLRCDDT | |
| | | AVYYCARASTPYSSGSWADYWGQGTLVTVSSGSASAPTLFPLVSCEN | |
| | | SPSDTSSV | |
| | Heavy Chain | QVQLVQSGAEVKKPGASVKVSCKASGYTFTGYYMHWVRQAPGQGL | 1604 |
| | Variable | EWMGWINPNSGGTNYAQKFQGRVTMTRDTSISTAYMELSRLRCDDT | |
| | Region | AVYYCARASTPYSSGSWADYWGQGTLVTVSS | |
| | HCDR1 | GYYMH | 1605 |
| | HCDR2 | WINPNSGGTNYAQKFQG | 1606 |
| | HCDR3 | ASTPYSSGSWADY | 1607 |
| | HFRW1 | QVQLVQSGAEVKKPGASVKVSCKASGYTFT | 1608 |
| | HFRW2 | WVRQAPGQGLEWMG | 1609 |
| | HFRW3 | RVTMTRDTSISTAYMELSRLRCDDTAVYYCAR | 1610 |
| | HFRW4 | WGQGTLVTVSS | 1611 |
| | Light Chain | QSALTQPASVSGSPGQSITISCTGTSSDVGGYNYVSWYQQHPGKAPKL | 1612 |
| | | MIYDVSNRPSGVSNRFSGSKSGNTASLTISGLQAEDEADYYCSSYASS | |
| | | STWVFGGGTKLTVLGQPKAAPSVTLFPPSSEELQANKATLVCLISDFY | |
| | | PGAVTVAWKADSSPVKAGVETTTPSKQSNNKYAASSYLSLT | |
| | Light Chain | QSALTQPASVSGSPGQSITISCTGTSSDVGGYNYVSWYQQHPGKAPKL | 1613 |
| | Variable | MIYDVSNRPSGVSNRFSGSKSGNTASLTISGLQAEDEADYYCSSYASS | |
| | Region | STWVFGGGTKLTVL | |
| | LCDR1 | TGTSSDVGGYNYVS | 1614 |
| | LCDR2 | DVSNRPS | 1615 |
| | LCDR3 | SSYASSSTWV | 1616 |
| | LFRW1 | QSALTQPASVSGSPGQSITISC | 1617 |
| | LFRW2 | WYQQHPGKAPKLMIY | 1618 |
| | LFRW3 | GVSNRFSGSKSGNTASLTISGLQAEDEADYYC | 1619 |
| | LFRW4 | FGGGTKLTVL | 1620 |
| S116-2822 | Heavy Chain | QVQLVESGGGVVQPGRSLRLSCAASGFTFSSYGMHWVRQAPGKGLE | 1825 |
| (Spike) | | WVAVISYDGSNKYYADSVKGRFTISRDNSKNTLYLQMNSLRAEDTA | |
| | | VYYCAKGDYYGSGSQYYFDYWGQGTLVTVSSGSASAPTLFPLVSCE | |
| | | NSPSDTSSV | |
| | Heavy Chain | QVQLVESGGGVVQPGRSLRLSCAASGFTFSSYGMHWVRQAPGKGLE | 1826 |
| | Variable | WVAVISYDGSNKYYADSVKGRFTISRDNSKNTLYLQMNSLRAEDTA | |
| | Region | VYYCAKGDYYGSGSQYYFDYWGQGTLVTVSS | |
| | HCDR1 | SYGMH | 1827 |
| | HCDR2 | VISYDGSNKYYADSVKG | 1828 |
| | HCDR3 | GDYYGSGSQYYFDY | 1829 |
| | HFRW1 | QVQLVESGGGVVQPGRSLRLSCAASGFTFS | 1830 |
| | HFRW2 | WVRQAPGKGLEWVA | 1831 |
| | HFRW3 | RFTISRDNSKNTLYLQMNSLRAEDTAVYYCAK | 1832 |
| | HFRW4 | WGQGTLVTVSS | 1833 |
| | Light Chain | DIQMTQSPSTLSASVGDRVTITCRASQSISSWLAWYQQKPGKAPKLLI | 1834 |
| | | YDASSLESGVPSRFSGSGSGTEFTLTISSLQPDDFATYYCQQYNSYSQT | |
| | | FGQGTKLEIKRTVAAPSVFIFPPSDEQLKSGTASVVCLLNNFYPREAK | |
| | | VQWKVDN~ | |
| | Light Chain | DIQMTQSPSTLSASVGDRVTITCRASQSISSWLAWYQQKPGKAPKLLI | 1835 |
| | Variable | YDASSLESGVPSRFSGSGSGTEFTLTISSLQPDDFATYYCQQYNSYSQT | |
| | Region | FGQGTKLEIK | |
| | LCDR1 | RASQSISSWLA | 1836 |
| | LCDR2 | DASSLES | 1837 |
| | LCDR3 | QQYNSYSQT | 1838 |
| | LFRW1 | DIQMTQSPSTLSASVGDRVTITC | 1839 |
| | LFRW2 | WYQQKPGKAPKLLIY | 1840 |
| | LFRW3 | GVPSRFSGSGSGTEFTLTISSLQPDDFATYYC | 1841 |
| | LFRW4 | FGQGTKLEIK | 1842 |
| S116-2825 | Heavy Chain | EVQLVESGGGLVQPGGSLRLSCAASGFTFSSYWMHWVRQAPGKGLV | 1843 |
| (Spike) | | WVSRINSDGSSTSYADSVKGRFTISRDNAKNTLYLQMNSLRAEDTAV | |
| | | YYCARVVLTYYYDSSGYQNAFDIWGQGTMVTVSSGSASAPTLFPLVS | |
| | | CENSPSDTSSV | |
| | Heavy Chain | EVQLVESGGGLVQPGGSLRLSCAASGFTFSSYWMHWVRQAPGKGLV | 1844 |
| | Variable | WVSRINSDGSSTSYADSVKGRFTISRDNAKNTLYLQMNSLRAEDTAV | |
| | Region | YYCARVVLTYYYDSSGYQNAFDIWGQGTMVTVSS | |
| | HCDR1 | SYWMH | 1845 |
| | HCDR2 | RINSDGSSTSYADSVKG | 1846 |
| | HCDR3 | VVLTYYYDSSGYQNAFDI | 1847 |
| | HFRW1 | EVQLVESGGGLVQPGGSLRLSCAASGFTFS | 1848 |
| | HFRW2 | WVRQAPGKGLVWVS | 1849 |
| | HFRW3 | RFTISRDNAKNTLYLQMNSLRAEDTAVYYCAR | 1850 |
| | HFRW4 | WGQGTMVTVSS | 1851 |
| | Light Chain | SSELTQDPAVSVALGQTVRITCQGDSLRSYYASWYQQKPGQAPVLVI | 1852 |
| | | YGKNNRPSGIPDRFSGSSSGNTASLTITGAQAEDEADYYCNSRDSSGN | |
| | | LVVFGGGTKLTVLGQPKAAPSVTLFPPSSEELQANKATLVCLISDFYP | |
| | | GAVTVAWKADSSPVKAGVETTKPSKQSNNKYAASS~ | |
| | Light Chain | SSELTQDPAVSVALGQTVRITCQGDSLRSYYASWYQQKPGQAPVLVI | 1853 |
| | Variable | YGKNNRPSGIPDRFSGSSSGNTASLTITGAQAEDEADYYCNSRDSSGN | |
| | Region | LVVFGGGTKLTVL | |
| | LCDR1 | QGDSLRSYYAS | 1854 |
| | LCDR2 | GKNNRPS | 1855 |
| | LCDR3 | NSRDSSGNLVV | 1856 |
| | LFRW1 | SSELTQDPAVSVALGQTVRITC | 1857 |
| | LFRW2 | WYQQKPGQAPVLVIY | 1858 |
| | LFRW3 | GIPDRFSGSSSGNTASLTITGAQAEDEADYYC | 1859 |
| | LFRW4 | FGGGTKLTVL | 1860 |
| S116-3179 | Heavy Chain | QVQLQESGPGLVKPSETLSLTCTVSGGSISSYYWSWIRQPPGKGLEWI | 1861 |
| (Spike) | | GYIYYSGSTNYNPSLKSRVTISVDTSKNQFSLKLTSVTAADTAVYYCA | |
| | | RCALLLGNAFDIWGQGTMVTVSSASTKGPSVFPLAPCSR~ | |
| | Heavy Chain | QVQLQESGPGLVKPSETLSLTCTVSGGSISSYYWSWIRQPPGKGLEWI | 1862 |
| | Variable | GYIYYSGSTNYNPSLKSRVTISVDTSKNQFSLKLTSVTAADTAVYYCA | |
| | Region | RCALLLGNAFDIWGQGTMVTVSS | |
| | HCDR1 | SYYWS | 1863 |
| | HCDR2 | YIYYSGSTNYNPSLKS | 1864 |
| | HCDR3 | CALLLGNAFDI | 1865 |
| | HFRW1 | QVQLQESGPGLVKPSETLSLTCTVSGGSIS | 1866 |
| | HFRW2 | WIRQPPGKGLEWIG | 1867 |
| | HFRW3 | RVTISVDTSKNQFSLKLTSVTAADTAVYYCAR | 1868 |
| | HFRW4 | WGQGTMVTVSS | 1869 |
| | Light Chain | DIQMTQSPSSVSASVGDRVTITCRASQGISSWLAWYQQKPGKAPKLLI | 1870 |
| | | YAAFSLQSGVPSRFSGSGSGTDFTLTISSLQPEDFATYYCQQANSFPRG | |
| | | LSFGGGTKVEIKRTVAAPSVFIFPPSDEQLKSGTASVVCLLNNFYPREA | |
| | | KVQWKVDN~ | |
| | Light Chain | DIQMTQSPSSVSASVGDRVTITCRASQGISSWLAWYQQKPGKAPKLLI | 1871 |
| | Variable | YAAFSLQSGVPSRFSGSGSGTDFTLTISSLQPEDFATYYCQQANSFPRG | |
| | Region | LSFGGGTKVEIK | |
| | LCDR1 | RASQGISSWLA | 1872 |
| | LCDR2 | AAFSLQS | 1873 |
| | LCDR3 | QQANSFPRGLS | 1874 |
| | LFRW1 | DIQMTQSPSSVSASVGDRVTITC | 1875 |
| | LFRW2 | WYQQKPGKAPKLLIY | 1876 |
| | LFRW3 | GVPSRFSGSGSGTDFTLTISSLQPEDFATYYC | 1877 |
| | LFRW4 | FGGGTKVEIK | 1878 |
| S144-121 | Heavy Chain | EVHLLESGGGLVQPGGSLRLSCAASGFTFSSYAMSWVRQTPGKGLE | 1879 |
| (Spike/ | | WISAITASGSDTFHADSVKGRFTISRDNSKDTLYLQMNSLRVEDTAIY | |
| RBD) | | YCAKGSSTARPYYFDYWGQGTLVTVSSGSASAPTLFPLVSCENSPSDT | |
| | | SSV | |
| | Heavy Chain | EVHLLESGGGLVQPGGSLRLSCAASGFTFSSYAMSWVRQTPGKGLE | 1880 |
| | Variable | WISAITASGSDTFHADSVKGRFTISRDNSKDTLYLQMNSLRVEDTAIY | |
| | Region | YCAKGSSTARPYYFDYWGQGTLVTVSS | |
| | HCDR1 | SYAMS | 1881 |
| | HCDR2 | AITASGSDTFHADSVKG | 1882 |
| | HCDR3 | GSSTARPYYFDY | 1883 |
| | HFRW1 | EVHLLESGGGLVQPGGSLRLSCAASGFTFS | 1884 |
| | HFRW2 | WVRQTPGKGLEWIS | 1885 |
| | HFRW3 | RFTISRDNSKDTLYLQMNSLRVEDTAIYYCAK | 1886 |
| | HFRW4 | WGQGTLVTVSS | 1887 |
| | Light Chain | EIVLTQSPGTLSLSPGERATLSCRASQSVSSSHLAWYQQKPGQSPRLLI | 1888 |
| | | YGTSNRATGIPDRFSGSGSGTDFTLSISRLEPEDFAVYYCQEYGSSRMF | |
| | | GQGTKVEIKRTVAAPSVFIFPPSDEQLKSGTASVVCLLNNFYPREAKV | |
| | | QWKVDNALQSGNSQESVTEQDSKDSTYSLSSTLTLSKADYE | |
| | Light Chain | EIVLTQSPGTLSLSPGERATLSCRASQSVSSSHLAWYQQKPGQSPRLLI | 1889 |
| | Variable | YGTSNRATGIPDRFSGSGSGTDFTLSISRLEPEDFAVYYCQEYGSSRMF | |
| | Region | GQGTKVEIK | |
| | LCDR1 | RASQSVSSSHLA | 1890 |
| | LCDR2 | GTSNRAT | 1891 |
| | LCDR3 | QEYGSSRM | 1892 |
| | LFRW1 | EIVLTQSPGTLSLSPGERATLSC | 1893 |
| | LFRW2 | WYQQKPGQSPRLLIY | 1894 |
| | LFRW3 | GIPDRFSGSGSGTDFTLSISRLEPEDFAVYYC | 1895 |
| | LFRW4 | FGQGTKVEIK | 1896 |
| S144-1364 | Heavy Chain | EVQLVQSGAEMKKPGESLKISCKASGYYFPSYWIAWVRQMPGRGLE | 1897 |
| (Spike) | | WMGIIYPVDSETTYSPSFQGHVTISADKSISTAYLQWSSLKASDTAMY | |
| | | YCARPNYYGSGSPPGYWGQGTLVTVSSGSASAPTLFPLVSCENSPSDT | |
| | | SSVAVG~ | |
| | Heavy Chain | EVQLVQSGAEMKKPGESLKISCKASGYYFPSYWIAWVRQMPGRGLE | 1898 |
| | Variable | WMGIIYPVDSETTYSPSFQGHVTISADKSISTAYLQWSSLKASDTAMY | |
| | Region | YCARPNYYGSGSPPGYWGQGTLVTVSS | |
| | HCDR1 | SYWIA | 1899 |
| | HCDR2 | IIYPVDSETTYSPSFQG | 1900 |
| | HCDR3 | PNYYGSGSPPGY | 1901 |
| | HFRW1 | EVQLVQSGAEMKKPGESLKISCKASGYYFP | 1902 |
| | HFRW2 | WVRQMPGRGLEWMG | 1903 |
| | HFRW3 | HVTISADKSISTAYLQWSSLKASDTAMYYCAR | 1904 |
| | HFRW4 | WGQGTLVTVSS | 1905 |
| | Light Chain | EIVLTQSPGTLSLSPGERATLSCRASQGVSSNYLAWYQQKPGQAPRLL | 1906 |
| | | IYGASSRATGIPDRFSGSGSGTDFTLTISRLEPEDFAVYYCQQYGTTPN | |
| | | TFGGGTKVEIKRTVAAPSVFIFPPSDEQLKSGTASVVCLLNNFYPREA | |
| | | KVQWKVDNALQSGNSQESVTEQDSKDSTYSLSSTLTLSKADYE | |
| | Light Chain | EIVLTQSPGTLSLSPGERATLSCRASQGVSSNYLAWYQQKPGQAPRLL | 1907 |
| | Variable | IYGASSRATGIPDRFSGSGSGTDFTLTISRLEPEDFAVYYCQQYGTTPN | |
| | Region | TFGGGTKVEIK | |
| | LCDR1 | RASQGVSSNYLA | 1908 |
| | LCDR2 | GASSRAT | 1909 |
| | LCDR3 | QQYGTTPNT | 1910 |
| | LFRW1 | EIVLTQSPGTLSLSPGERATLSC | 1911 |
| | LFRW2 | WYQQKPGQAPRLLIY | 1912 |
| | LFRW3 | GIPDRFSGSGSGTDFTLTISRLEPEDFAVYYC | 1913 |
| | LFRW4 | FGGGTKVEIK | 1914 |
| S144-292 | Heavy Chain | EVQLVQSGAEVKKPGESLKISCKGSGYTFTNYWIGWVRQMPGKGLE | 1915 |
| (Spike) | | WMGIIYPGDSDTRYSPSFQGQVTISADKSISTAYLQWSSLKASDTAMY | |
| | | YCARLFCGGDCPFDYWGQGTLVTVSSASTKGPSVFPLAPCSRSTSGG | |
| | | TAALGCLVKDYFPEPVTVSWNSGALTSGVHTFPAVLQSSG | |
| | Heavy Chain | EVQLVQSGAEVKKPGESLKISCKGSGYTFTNYWIGWVRQMPGKGLE | 1916 |
| | Variable | WMGIIYPGDSDTRYSPSFQGQVTISADKSISTAYLQWSSLKASDTAMY | |
| | Region | YCARLFCGGDCPFDYWGQGTLVTVSS | |
| | HCDR1 | NYWIG | 1917 |
| | HCDR2 | IIYPGDSDTRYSPSFQG | 1918 |
| | HCDR3 | LFCGGDCPFDY | 1919 |
| | HFRW1 | EVQLVQSGAEVKKPGESLKISCKGSGYTFT | 1920 |
| | HFRW2 | WVRQMPGKGLEWMG | 1921 |
| | HFRW3 | QVTISADKSISTAYLQWSSLKASDTAMYYCAR | 1922 |
| | HFRW4 | WGQGTLVTVSS | 1923 |
| | Light Chain | DIQMTQSPSTLSASVGDRVTITCRASQSISSWLAWYQQKPGKAPNLLI | 1924 |
| | | YDASSLESGVPSRFSGSGSGTEFTLTISSLQPDDFATYYCQQYNTYPRT | |
| | | FGQGTKVEIKRTVAAPSVFIFPPSDEQLKSGTASVVCLLNNFYPREAK | |
| | | VQWKVDNALQSGNSQESVTEQDSKDSTYSLSSTLTLSKADYE~ | |
| | Light Chain | DIQMTQSPSTLSASVGDRVTITCRASQSISSWLAWYQQKPGKAPNLLI | 1925 |
| | Variable | YDASSLESGVPSRFSGSGSGTEFTLTISSLQPDDFATYYCQQYNTYPRT | |
| | Region | FGQGTKVEIK | |
| | LCDR1 | RASQSISSWLA | 1926 |
| | LCDR2 | DASSLES | 1927 |
| | LCDR3 | QQYNTYPRT | 1928 |
| | LFRW1 | DIQMTQSPSTLSASVGDRVTITC | 1929 |
| | LFRW2 | WYQQKPGKAPNLLIY | 1930 |
| | LFRW3 | GVPSRFSGSGSGTEFTLTISSLQPDDFATYYC | 1931 |
| | LFRW4 | FGQGTKVEIK | 1932 |
| S155-37 | Heavy Chain | EVQLLESGGGLVQPGGSLRLSCAASGFSFSNYAMSWVRQAPGKGLE | 1933 |
| (Spike/ | | WVSAVSGNGVGTFHADSVKGRFTISRDNSKDTFYLQMSGLTVDDTA | |
| RBD) | | LYYCVKGSAAARPYYFDYWGQGILVAVSSGSASAPTLFPLVSCENSP | |
| | | SDTSSV | |
| | Heavy Chain | EVQLLESGGGLVQPGGSLRLSCAASGFSFSNYAMSWVRQAPGKGLE | 1934 |
| | Variable | WVSAVSGNGVGTFHADSVKGRFTISRDNSKDTFYLQMSGLTVDDTA | |
| | Region | LYYCVKGSAAARPYYFDYWGQGILVAVSS | |
| | HCDR1 | NYAMS | 1935 |
| | HCDR2 | AVSGNGVGTFHADSVKG | 1936 |
| | HCDR3 | GSAAARPYYFDY | 1937 |
| | HFRW1 | EVQLLESGGGLVQPGGSLRLSCAASGFSFS | 1938 |
| | HFRW2 | WVRQAPGKGLEWVS | 1939 |
| | HFRW3 | RFTISRDNSKDTFYLQMSGLTVDDTALYYCVK | 1940 |
| | HFRW4 | WGQGILVAVSS | 1941 |
| | Light Chain | EIVLTQSPGTLSLSPGERATLSCRASQTVSSNYLAWYQQKPAQGPRLV | 1942 |
| | | IYGASNRATGIPDRFSGSGSGTDFTLTISRLEPEDFAVYYCQQYGNSRI | |
| | | FGQGTKVEIKRTVAAPSVFIFPPSDEQLKSGTASVVCLLNNFYPREAK | |
| | | VQWKVDN~ | |
| | Light Chain | EIVLTQSPGTLSLSPGERATLSCRASQTVSSNYLAWYQQKPAQGPRLV | 1943 |
| | Variable | IYGASNRATGIPDRFSGSGSGTDFTLTISRLEPEDFAVYYCQQYGNSRI | |
| | Region | FGQGTKVEIK | |
| | LCDR1 | RASQTVSSNYLA | 1944 |
| | LCDR2 | GASNRAT | 1945 |
| | LCDR3 | QQYGNSRI | 1946 |
| | LFRW1 | EIVLTQSPGTLSLSPGERATLSC | 1947 |
| | LFRW2 | WYQQKPAQGPRLVIY | 1948 |
| | LFRW3 | GIPDRFSGSGSGTDFTLTISRLEPEDFAVYYC | 1949 |
| | LFRW4 | FGQGTKVEIK | 1950 |
| S166-1318 | Heavy Chain | EVQLVESGGGLVQPGGSLRLSCAASGFTFTIYWMSWVRQAPGKGLE | 1951 |
| (Spike) | | WVANIKQDGSEKYYVDSVKGRFTISRDNAKNSLYLQMNSLRAEDTA | |
| | | VYYCARDGIAVAGGFDYWGQGTLVTVSSGSASAPTLFPLVSCENSPS | |
| | | DTSSV | |
| | Heavy Chain | EVQLVESGGGLVQPGGSLRLSCAASGFTFTIYWMSWVRQAPGKGLE | 1952 |
| | Variable | WVANIKQDGSEKYYVDSVKGRFTISRDNAKNSLYLQMNSLRAEDTA | |
| | Region | VYYCARDGIAVAGGFDYWGQGTLVTVSS | |
| | HCDR1 | IYWMS | 1953 |
| | HCDR2 | NIKQDGSEKYYVDSVKG | 1954 |
| | HCDR3 | DGIAVAGGFDY | 1955 |
| | HFRW1 | EVQLVESGGGLVQPGGSLRLSCAASGFTFT | 1956 |
| | HFRW2 | WVRQAPGKGLEWVA | 1957 |
| | HFRW3 | RFTISRDNAKNSLYLQMNSLRAEDTAVYYCAR | 1958 |
| | HFRW4 | WGQGTLVTVSS | 1959 |
| | Light Chain | SYELTQPPSVSVSPGQTASITCSGDKLGDKYACWYQQKPGQSPVLVIY | 1960 |
| | | QDSKRPSGIPERFSGSNSGNTATLTISGTQAMDEADYYCQAWDSSTV | |
| | | VFGGGTKLTVLGQPKAAPSVTLFPPSSEELQANKATLVCLISDFYPGA | |
| | | VTVAWKADSSPVKAGVETTTPSKQSNNKYAASS~ | |
| | Light Chain | SYELTQPPSVSVSPGQTASITCSGDKLGDKYACWYQQKPGQSPVLVIY | 1961 |
| | Variable | QDSKRPSGIPERFSGSNSGNTATLTISGTQAMDEADYYCQAWDSSTV | |
| | Region | VFGGGTKLTVL | |
| | LCDR1 | SGDKLGDKYAC | 1962 |
| | LCDR2 | QDSKRPS | 1963 |
| | LCDR3 | QAWDSSTVV | 1964 |
| | LFRW1 | SYELTQPPSVSVSPGQTASITC | 1965 |
| | LFRW2 | WYQQKPGQSPVLVIY | 1966 |
| | LFRW3 | GIPERFSGSNSGNTATLTISGTQAMDEADYYC | 1967 |
| | LFRW4 | FGGGTKLTVL | 1968 |
| S166-1366 | Heavy Chain | QITLKESGPTLVKPTQTLTLTCTFSGFSLSTSGVGVGWIRQPPGKALE | 1969 |
| (Spike) | | WLALIYWDDDKRYRPSLKSRLSITKDTSKNQVVLTMTNMDPVDTAT | |
| | | YYCAHHHPILDFDYWGQGTLVTVSSGSASAPTLFPLVSCENSPSDTSS | |
| | | V | |
| | Heavy Chain | QITLKESGPTLVKPTQTLTLTCTFSGFSLSTSGVGVGWIRQPPGKALE | 1970 |
| | Variable | WLALIYWDDDKRYRPSLKSRLSITKDTSKNQVVLTMTNMDPVDTAT | |
| | Region | YYCAHHHPILDFDYWGQGTLVTVSS | |
| | HCDR1 | TSGVGVG | 1971 |
| | HCDR2 | LIYWDDDKRYRPSLKS | 1972 |
| | HCDR3 | HHPILDFDY | 1973 |
| | HFRW1 | QITLKESGPTLVKPTQTLTLTCTFSGFSLS | 1974 |
| | HFRW2 | WIRQPPGKALEWLA | 1975 |
| | HFRW3 | RLSITKDTSKNQVVLTMTNMDPVDTATYYCAH | 1976 |
| | HFRW4 | WGQGTLVTVSS | 1977 |
| | Light Chain | SYELTQPPSVSVSPGQTASITCSGDKLGDKYACWYQQKPGQSPVLVIY | 1978 |
| | | QDSKRPSGIPERFSGSNSGNTATLTISGTQAMDEADYYCQAWDSSTR | |
| | | DYVFGTGTKVTVLGQPKANPTVTLFPPSSEELQANKATLVCLISDFYP | |
| | | GAVTVAWKADGSPVKAGVETTKPSKQSNNKYAASS~ | |
| | Light Chain | SYELTQPPSVSVSPGQTASITCSGDKLGDKYACWYQQKPGQSPVLVIY | 1979 |
| | Variable | QDSKRPSGIPERFSGSNSGNTATLTISGTQAMDEADYYCQAWDSSTR | |
| | Region | DYVFGTGTKVTVL | |
| | LCDR1 | SGDKLGDKYAC | 1980 |
| | LCDR2 | QDSKRPS | 1981 |
| | LCDR3 | QAWDSSTRDYV | 1982 |
| | LFRW1 | SYELTQPPSVSVSPGQTASITC | 1983 |
| | LFRW2 | WYQQKPGQSPVLVIY | 1984 |
| | LFRW3 | GIPERFSGSNSGNTATLTISGTQAMDEADYYC | 1985 |
| | LFRW4 | FGTGTKVTVL | 1986 |
| S166-2395 | Heavy Chain | QVQLQESGPGLVKPSETLSLTCTVSGGSISTYYWSWIRQPAGKGLEWI | 1987 |
| (Spike) | | GRIYTSGSTNYNPSLKSRVTMSVDTSKNQFSLKLSSVTAADTAVYYC | |
| | | AREVTMIVLGYNWFDPWGQGTLVTVSSAPTKAPDVFPIISGCRHPKD | |
| | | NSPVVLACLITGYH | |
| | Heavy Chain | QVQLQESGPGLVKPSETLSLTCTVSGGSISTYYWSWIRQPAGKGLEWI | 1988 |
| | Variable | GRIYTSGSTNYNPSLKSRVTMSVDTSKNQFSLKLSSVTAADTAVYYC | |
| | Region | AREVTMIVLGYNWFDPWGQGTLVTVSS | |
| | HCDR1 | TYYWS | 1989 |
| | HCDR2 | RIYTSGSTNYNPSLKS | 1990 |
| | HCDR3 | EVTMIVLGYNWFDP | 1991 |
| | HFRW1 | QVQLQESGPGLVKPSETLSLTCTVSGGSIS | 1992 |
| | HFRW2 | WIRQPAGKGLEWIG | 1993 |
| | HFRW3 | RVTMSVDTSKNQFSLKLSSVTAADTAVYYCAR | 1994 |
| | HFRW4 | WGQGTLVTVSS | 1995 |
| | Light Chain | SYVLTQTPSVSVAPGQTARITCGGNNIGSKSVHWYQQKPGQAPVLVV | 1996 |
| | | HDESDRPSGIPERFFGSNSGNTATLTISRVEAGDEADYYCQVWDSSSD | |
| | | HLHVFGTGTKVTVLGQPKANPTVTLFPPSSEELQANKATLVCLISDFY | |
| | | PGAVTVAWKADGSPVKAGVETTKPSKQSNNKYAASS | |
| | Light Chain | SYVLTQTPSVSVAPGQTARITCGGNNIGSKSVHWYQQKPGQAPVLVV | 1997 |
| | Variable | HDESDRPSGIPERFFGSNSGNTATLTISRVEAGDEADYYCQVWDSSSD | |
| | Region | HLHVFGTGTKVTVL | |
| | LCDR1 | GGNNIGSKSVH | 1998 |
| | LCDR2 | DESDRPS | 1999 |
| | LCDR3 | QVWDSSSDHLHV | 2000 |
| | LFRW1 | SYVLTQTPSVSVAPGQTARITC | 2001 |
| | LFRW2 | WYQQKPGQAPVLVVH | 2002 |
| | LFRW3 | GIPERFFGSNSGNTATLTISRVEAGDEADYYC | 2003 |
| | LFRW4 | FGTGTKVTVL | 2004 |
| S166-2620 | Heavy Chain | EVQLVESGGGLVQPGGSLRLSCAASGFTFSSYWMSWVRQAPGKGLE | 2005 |
| (Spike) | | WVANIKQDGSEKYYVASVKGRFTISRDNAKNSLYLQMNSLRAEDTA | |
| | | VYYCARDSIAVAGGLDYWGQGTLVTVSSGSASAPTLFPLVSCENSPS | |
| | | DTSSV | |
| | Heavy Chain | EVQLVESGGGLVQPGGSLRLSCAASGFTFSSYWMSWVRQAPGKGLE | 2006 |
| | Variable | WVANIKQDGSEKYYVASVKGRFTISRDNAKNSLYLQMNSLRAEDTA | |
| | Region | VYYCARDSIAVAGGLDYWGQGTLVTVSS | |
| | HCDR1 | SYWMS | 2007 |
| | HCDR2 | NIKQDGSEKYYVASVKG | 2008 |
| | HCDR3 | DSIAVAGGLDY | 2009 |
| | HFRW1 | EVQLVESGGGLVQPGGSLRLSCAASGFTFS | 2010 |
| | HFRW2 | WVRQAPGKGLEWVA | 2011 |
| | HFRW3 | RFTISRDNAKNSLYLQMNSLRAEDTAVYYCAR | 2012 |
| | HFRW4 | WGQGTLVTVSS | 2013 |
| | Light Chain | SYELTQPPSVSVSPGQTASITCSGDKLGDKYACWYQQKPGQSPVLVIY | 2014 |
| | | QDSKRPSGIPERFSGSNSGNTATLTISGTQAMDEADYFCQAWDSSTVV | |
| | | FGGGTKLTVLRQPKAAPSVTLFPPSSEELQANKATLVCLISDFYPGAV | |
| | | TVAWKADSSPVKAGVETTTPSKQSNNKYAASS | |
| | Light Chain | SYELTQPPSVSVSPGQTASITCSGDKLGDKYACWYQQKPGQSPVLVIY | 2015 |
| | Variable | QDSKRPSGIPERFSGSNSGNTATLTISGTQAMDEADYFCQAWDSSTVV | |
| | Region | FGGGTKLTVL | |
| | LCDR1 | SGDKLGDKYAC | 2016 |
| | LCDR2 | QDSKRPS | 2017 |
| | LCDR3 | QAWDSSTVV | 2018 |
| | LFRW1 | SYELTQPPSVSVSPGQTASITC | 2019 |
| | LFRW2 | WYQQKPGQSPVLVIY | 2020 |
| | LFRW3 | GIPERFSGSNSGNTATLTISGTQAMDEADYFC | 2021 |
| | LFRW4 | FGGGTKLTVL | 2022 |
| S166-32 | Heavy Chain | QVQLVESGGGLVKPGGSLRLSCAASGFTFSDYYMSWIRQAPGKGLE | 2023 |
| (Spike) | | WVSYISISDTTIYYADAVQGRFTMSRDNAKNSLYLQMNSLKAEDTAV | |
| | | YYCARASPYCGGDCSFGNAFDIWGLGTMVTVSSASTKGPSVFPLAPS | |
| | | SKSTSGGTAALGCLVKDYFPEPVTVSWNSGALTSGVHTFPAVLQSSG | |
| | Heavy Chain | QVQLVESGGGLVKPGGSLRLSCAASGFTFSDYYMSWIRQAPGKGLE | 2024 |
| | Variable | WVSYISISDTTIYYADAVQGRFTMSRDNAKNSLYLQMNSLKAEDTAV | |
| | Region | YYCARASPYCGGDCSFGNAFDIWGLGTMVTVSS | |
| | HCDR1 | DYYMS | 2025 |
| | HCDR2 | YISISDTTIYYADAVQG | 2026 |
| | HCDR3 | ASPYCGGDCSFGNAFDI | 2027 |
| | HFRW1 | QVQLVESGGGLVKPGGSLRLSCAASGFTFS | 2028 |
| | HFRW2 | WIRQAPGKGLEWVS | 2029 |
| | HFRW3 | RFTMSRDNAKNSLYLQMNSLKAEDTAVYYCAR | 2030 |
| | HFRW4 | WGLGTMVTVSS | 2031 |
| | Light Chain | DIQMTQSPSTLSASVGDRVTITCRASQSIFSWLAWYQQKPGKAPKLLI | 2032 |
| | | YDASSLESGVPSRFSGSGSGTEFTLTISSLQPDDFATYYCQQYNSYWT | |
| | | FGQGTKVEIKRTVAAPSVFIFPPSDEQLKSGTASVVCLLNNFYPREAK | |
| | | VQWKVDNALQSGNSQESVTEQDSKDSTYSLSSTLTLSKADYE | |
| | Light Chain | DIQMTQSPSTLSASVGDRVTITCRASQSIFSWLAWYQQKPGKAPKLLI | 2033 |
| | Variable | YDASSLESGVPSRFSGSGSGTEFTLTISSLQPDDFATYYCQQYNSYWT | |
| | Region | FGQGTKVEIK | |
| | LCDR1 | RASQSIFSWLA | 2034 |
| | LCDR2 | DASSLES | 2035 |
| | LCDR3 | QQYNSYWT | 2036 |
| | LFRW1 | DIQMTQSPSTLSASVGDRVTITC | 2037 |
| | LFRW2 | WYQQKPGKAPKLLIY | 2038 |
| | LFRW3 | GVPSRFSGSGSGTEFTLTISSLQPDDFATYYC | 2039 |
| | LFRW4 | FGQGTKVEIK | 2040 |
| S171-1150 | Heavy Chain | EVQLVESGGGLVQPGGSLRLSCAASGFTFSSYWMSWVRQAPGKGLE | 2041 |
| (Spike) | | WVANIKQDGSEKYYVDSVKGRFTISRDNAKNSLYLQMNSLRAEDTA | |
| | | VYYCARDGIAVAGGLDYWGQGTLVTVSSAPTKAPDVFPIISGCRHPK | |
| | | DNSPVVLACLITGYH~ | |
| | Heavy Chain | EVQLVESGGGLVQPGGSLRLSCAASGFTFSSYWMSWVRQAPGKGLE | 2042 |
| | Variable | WVANIKQDGSEKYYVDSVKGRFTISRDNAKNSLYLQMNSLRAEDTA | |
| | Region | VYYCARDGIAVAGGLDYWGQGTLVTVSS | |
| | HCDR1 | SYWMS | 2043 |
| | HCDR2 | NIKQDGSEKYYVDSVKG | 2044 |
| | HCDR3 | DGIAVAGGLDY | 2045 |
| | HFRW1 | EVQLVESGGGLVQPGGSLRLSCAASGFTFS | 2046 |
| | HFRW2 | WVRQAPGKGLEWVA | 2047 |
| | HFRW3 | RFTISRDNAKNSLYLQMNSLRAEDTAVYYCAR | 2048 |
| | HFRW4 | WGQGTLVTVSS | 2049 |
| | Light Chain | SYELTQPPSVSVSPGQTASITCSGDKLGDKYACWYQQKPGQSPVLVIY | 2050 |
| | | QDSKRPSGIPERFSGSNSGNTATLTISGTQAMDEADYYCQAWDSSTV | |
| | | VFGGGTKLTVLGQPKAAPSVTLFPPSSEELQANKATLVCLISDFYPGA | |
| | | VTVAWKADSSPVKAGVETTTPSKQSNNKYAASS~ | |
| | Light Chain | SYELTQPPSVSVSPGQTASITCSGDKLGDKYACWYQQKPGQSPVLVIY | 2051 |
| | Variable | QDSKRPSGIPERFSGSNSGNTATLTISGTQAMDEADYYCQAWDSSTV | |
| | Region | VFGGGTKLTVL | |
| | LCDR1 | SGDKLGDKYAC | 2052 |
| | LCDR2 | QDSKRPS | 2053 |
| | LCDR3 | QAWDSSTVV | 2054 |
| | LFRW1 | SYELTQPPSVSVSPGQTASITC | 2055 |
| | LFRW2 | WYQQKPGQSPVLVIY | 2056 |
| | LFRW3 | GIPERFSGSNSGNTATLTISGTQAMDEADYYC | 2057 |
| | LFRW4 | FGGGTKLTVL | 2058 |
| S171-1285 | Heavy Chain | QVQLVESGGGVVQPGRSLRLSCAASGFIFSNNALHWVRQAPGKGLE | 2059 |
| (Spike) | | WVAIISYDGSNKNYAASVKGRFTISRDNSQNTVFLQMNSLRAEDTAV | |
| | | YYCARDHIAGAAKYFDYWGQGTLVTVSSASTKGPSVFPLAPSSKSTS | |
| | | GGTAALGCLVKDYFPEPVTVSWNSGALTSGVHTFPAVLQSSG | |
| | Heavy Chain | QVQLVESGGGVVQPGRSLRLSCAASGFIFSNNALHWVRQAPGKGLE | 2060 |
| | Variable | WVAIISYDGSNKNYAASVKGRFTISRDNSQNTVFLQMNSLRAEDTAV | |
| | Region | YYCARDHIAGAAKYFDYWGQGTLVTVSS | |
| | HCDR1 | NNALH | 2061 |
| | HCDR2 | IISYDGSNKNYAASVKG | 2062 |
| | HCDR3 | DHIAGAAKYFDY | 2063 |
| | HFRW1 | QVQLVESGGGVVQPGRSLRLSCAASGFIFS | 2064 |
| | HFRW2 | WVRQAPGKGLEWVA | 2065 |
| | HFRW3 | RFTISRDNSQNTVFLQMNSLRAEDTAVYYCAR | 2066 |
| | HFRW4 | WGQGTLVTVSS | 2067 |
| | Light Chain | SYELTQPPSVSVSPGQTARITCSGDALPKKFVHWYQQKSGQAPVLVIY | 2068 |
| | | EDSKRPSGIPERFSGSSSGTTATLTISGAQVEDEGDYYCYSTDSSGRGV | |
| | | FGGGTKLTVLGQPKAAPSVTLFPPSSEELQANKATLVCLISDFYPGAV | |
| | | TVAWKADSSPVKAGVETTTPSKQSNNKYAASS | |
| | Light Chain | SYELTQPPSVSVSPGQTARITCSGDALPKKFVHWYQQKSGQAPVLVIY | 2069 |
| | Variable | EDSKRPSGIPERFSGSSSGTTATLTISGAQVEDEGDYYCYSTDSSGRGV | |
| | Region | FGGGTKLTVL | |
| | LCDR1 | SGDALPKKFVH | 2070 |
| | LCDR2 | EDSKRPS | 2071 |
| | LCDR3 | YSTDSSGRGV | 2072 |
| | LFRW1 | SYELTQPPSVSVSPGQTARITC | 2073 |
| | LFRW2 | WYQQKSGQAPVLVIY | 2074 |
| | LFRW3 | GIPERFSGSSSGTTATLTISGAQVEDEGDYYC | 2075 |
| | LFRW4 | FGGGTKLTVL | 2076 |
| S171-692 | Heavy Chain | QVQLQESGPGLVKPSQTLSLTCTVSGGSISSGSYYWSWIRQPAGKGLE | 2077 |
| (Spike) | | WIGRIYTSGSTNYNPSLKSRVTISVDTSKNQFSLKLSSVTAADTAVYY | |
| | | CARESKVTMVRGGLAYYYMDVWGKGTTVTVSSAPTKAPDVFPIISG | |
| | | CRHPKDNSPVVLACLITGYH | |
| | Heavy Chain | QVQLQESGPGLVKPSQTLSLTCTVSGGSISSGSYYWSWIRQPAGKGLE | 2078 |
| | Variable | WIGRIYTSGSTNYNPSLKSRVTISVDTSKNQFSLKLSSVTAADTAVYY | |
| | Region | CARESKVTMVRGGLAYYYMDVWGKGTTVTVSS | |
| | HCDR1 | SGSYYWS | 2079 |
| | HCDR2 | RIYTSGSTNYNPSLKS | 2080 |
| | HCDR3 | ESKVTMVRGGLAYYYMDV | 2081 |
| | HFRW1 | QVQLQESGPGLVKPSQTLSLTCTVSGGSIS | 2082 |
| | HFRW2 | WIRQPAGKGLEWIG | 2083 |
| | HFRW3 | RVTISVDTSKNQFSLKLSSVTAADTAVYYCAR | 2084 |
| | HFRW4 | WGKGTTVTVSS | 2085 |
| | Light Chain | DIQMTQSPSSLSASVGDRVTITCRASQSISSYLNWYQQKPGKAPKLLIY | 2086 |
| | | AASSLQSGVPSRFSGSGSGTDFTLTISSLQPEDFATYYCQQSYSKNTFG | |
| | | QGTKLEIKRTVAAPSVFIFPPSDEQLKSGTASVVCLLNNFYPREAKVQ | |
| | | WKVDN~ | |
| | Light Chain | DIQMTQSPSSLSASVGDRVTITCRASQSISSYLNWYQQKPGKAPKLLIY | 2087 |
| | Variable | AASSLQSGVPSRFSGSGSGTDFTLTISSLQPEDFATYYCQQSYSKNTFG | |
| | Region | QGTKLEIK | |
| | LCDR1 | RASQSISSYLN | 2088 |
| | LCDR2 | AASSLQS | 2089 |
| | LCDR3 | QQSYSKNT | 2090 |
| | LFRW1 | DIQMTQSPSSLSASVGDRVTITC | 2091 |
| | LFRW2 | WYQQKPGKAPKLLIY | 2092 |
| | LFRW3 | GVPSRFSGSGSGTDFTLTISSLQPEDFATYYC | 2093 |
| | LFRW4 | FGQGTKLEIK | 2094 |
| S179-122 | Heavy Chain | EVQLVESGGGLVQPGGSLRLSCAASGFTFSTYWMSWVRQAPGKGLE | 2095 |
| (Spike/ | | WVANIKQDGSEKYYVDSVKGRFTISRDNAKNSLYLQMNSLRAEDTA | |
| RBD) | | VYYCASKLWLRGNFDYWGQGTLVTVSSASTKGPSVFPLAPSSKSTSG | |
| | | GTAALGCLVKDYFPEPVTVSWNSGALTSGVHTFPAVLQSSG | |
| | Heavy Chain | EVQLVESGGGLVQPGGSLRLSCAASGFTFSTYWMSWVRQAPGKGLE | 2096 |
| | Variable | WVANIKQDGSEKYYVDSVKGRFTISRDNAKNSLYLQMNSLRAEDTA | |
| | Region | VYYCASKLWLRGNFDYWGQGTLVTVSS | |
| | HCDR1 | TYWMS | 2097 |
| | HCDR2 | NIKQDGSEKYYVDSVKG | 2098 |
| | HCDR3 | KLWLRGNFDY | 2099 |
| | HFRW1 | EVQLVESGGGLVQPGGSLRLSCAASGFTFS | 2100 |
| | HFRW2 | WVRQAPGKGLEWVA | 2101 |
| | HFRW3 | RFTISRDNAKNSLYLQMNSLRAEDTAVYYCAS | 2102 |
| | HFRW4 | WGQGTLVTVSS | 2103 |
| | Light Chain | NFMLTQPHSVSESPGKTVTISCTGSSGSIASNYVQWYQQRPGSAPTTVI | 2104 |
| | | YEDNQRPSGVPDRFSGSIDSSSNSASLTISGLKTEDEADYYCQSYDSSN | |
| | | LVFGGGTKLTVLGQPKAAPSVTLFPPSSEELQANKATLVCLISDFYPG | |
| | | AVTVAWKADSSPVKAGVETTTPSKQSNNKYAASSYLSLTPEQWKSH | |
| | Light Chain | NFMLTQPHSVSESPGKTVTISCTGSSGSIASNYVQWYQQRPGSAPTTVI | 2105 |
| | Variable | YEDNQRPSGVPDRFSGSIDSSSNSASLTISGLKTEDEADYYCQSYDSSN | |
| | Region | LVFGGGTKLTVL | |
| | LCDR1 | TGSSGSIASNYVQ | 2106 |
| | LCDR2 | EDNQRPS | 2107 |
| | LCDR3 | QSYDSSNLV | 2108 |
| | LFRW1 | NFMLTQPHSVSESPGKTVTISC | 2109 |
| | LFRW2 | WYQQRPGSAPTTVIY | 2110 |
| | LFRW3 | GVPDRFSGSIDSSSNSASLTISGLKTEDEADYYC | 2111 |
| | LFRW4 | FGGGTKLTVL | 2112 |
| S179-20 | Heavy Chain | QVQLVESGGGVVQPGRSLRLSCAASGFTFSGYGMHWVRQAPGKGLE | 2113 |
| (Spike/ | | WVAVIWFDGSNKYYADSVKGRFTISRDNSKNTLYLQMNSLRAEDTA | |
| RBD) | | VYYCARDARYYDTSGYLGTTEFDYWGQGTLVTVSSGSASAPTLFPLV | |
| | | SCENSPSDTSSVA | |
| | Heavy Chain | QVQLVESGGGVVQPGRSLRLSCAASGFTFSGYGMHWVRQAPGKGLE | 2114 |
| | Variable | WVAVIWFDGSNKYYADSVKGRFTISRDNSKNTLYLQMNSLRAEDTA | |
| | Region | VYYCARDARYYDTSGYLGTTEFDYWGQGTLVTVSS | |
| | HCDR1 | GYGMH | 2115 |
| | HCDR2 | VIWFDGSNKYYADSVKG | 2116 |
| | HCDR3 | DARYYDTSGYLGTTEFDY | 2117 |
| | HFRW1 | QVQLVESGGGVVQPGRSLRLSCAASGFTFS | 2118 |
| | HFRW2 | WVRQAPGKGLEWVA | 2119 |
| | HFRW3 | RFTISRDNSKNTLYLQMNSLRAEDTAVYYCAR | 2120 |
| | HFRW4 | WGQGTLVTVSS | 2121 |
| | Light Chain | EVVLTQSPATLSVSPGERATLSCRASQSVSSNLAWYQQKPGQAPRLLI | 2122 |
| | | YGASTRATGIPARFSGSGSGTEFTLTISSLQSEDFAVYYCQQYNNWPR | |
| | | TFGQGTKVEIKRTVAAPSVFIFPPSDEQLKSGTASVVCLLNNFYPREA | |
| | | KVQWKVDNALQSGNSQESVTEQDSKDSTYSLSSTLTLSKADYE~ | |
| | Light Chain | EVVLTQSPATLSVSPGERATLSCRASQSVSSNLAWYQQKPGQAPRLLI | 2123 |
| | Variable | YGASTRATGIPARFSGSGSGTEFTLTISSLQSEDFAVYYCQQYNNWPR | |
| | Region | TFGQGTKVEIK | |
| | LCDR1 | RASQSVSSNLA | 2124 |
| | LCDR2 | GASTRAT | 2125 |
| | LCDR3 | QQYNNWPRT | 2126 |
| | LFRW1 | EVVLTQSPATLSVSPGERATLSC | 2127 |
| | LFRW2 | WYQQKPGQAPRLLIY | 2128 |
| | LFRW3 | GIPARFSGSGSGTEFTLTISSLQSEDFAVYYC | 2129 |
| | LFRW4 | FGQGTKVEIK | 2130 |
| S179-27 | Heavy Chain | QVQLVESGGGVVQPGRSLRLSCAASGFTFRSYGMHWVRQAPGKGLE | 2131 |
| (Spike/ | | WVAVISYDGSNKNYADSVKGRLTISRDNSKNTLYLQMNSLRAEDTA | |
| RBD) | | VYYCAKDRGGYSSGWTYYYYGMDVWGQGTTVTVSSASTKGPSVFP | |
| | | LAPSSKSTSGGTAALGCLVKDYFPEPVTVSWNSGALTSGVHTFPAVL | |
| | | QSSGLYSLSSVVTVPSSSLGTQTYICNVNHKPSNTKVD~ | |
| | Heavy Chain | QVQLVESGGGVVQPGRSLRLSCAASGFTFRSYGMHWVRQAPGKGLE | 2132 |
| | Variable | WVAVISYDGSNKNYADSVKGRLTISRDNSKNTLYLQMNSLRAEDTA | |
| | Region | VYYCAKDRGGYSSGWTYYYYGMDVWGQGTTVTVSS | |
| | HCDR1 | SYGMH | 2133 |
| | HCDR2 | VISYDGSNKNYADSVKG | 2134 |
| | HCDR3 | DRGGYSSGWTYYYYGMDV | 2135 |
| | HFRW1 | QVQLVESGGGVVQPGRSLRLSCAASGFTFR | 2136 |
| | HFRW2 | WVRQAPGKGLEWVA | 2137 |
| | HFRW3 | RLTISRDNSKNTLYLQMNSLRAEDTAVYYCAK | 2138 |
| | HFRW4 | WGQGTTVTVSS | 2139 |
| | Light Chain | DIQMTQSPSSLSASVGDRVTITCQASQDISNYLNWYQQKPGKAPKLLI | 2140 |
| | | YDASNLETGVPSRFSGSGSGTDFTFTISSLQPEDIATYYCQQYDNLPLT | |
| | | FGGGTKVEIKRTVAAPSVFIFPPSDEQLKSGTASVVCLLNNFYPREAK | |
| | | VQWKVDNALQSGNSQESVTEQDSKDSTYSLSSTLTLSKADYE~ | |
| | Light Chain | DIQMTQSPSSLSASVGDRVTITCQASQDISNYLNWYQQKPGKAPKLLI | 2141 |
| | Variable | YDASNLETGVPSRFSGSGSGTDFTFTISSLQPEDIATYYCQQYDNLPLT | |
| | Region | FGGGTKVEIK | |
| | LCDR1 | QASQDISNYLN | 2142 |
| | LCDR2 | DASNLET | 2143 |
| | LCDR3 | QQYDNLPLT | 2144 |
| | LFRW1 | DIQMTQSPSSLSASVGDRVTITC | 2145 |
| | LFRW2 | WYQQKPGKAPKLLIY | 2146 |
| | LFRW3 | GVPSRFSGSGSGTDFTFTISSLQPEDIATYYC | 2147 |
| | LFRW4 | FGGGTKVEIK | 2148 |
| S179-28 | Heavy Chain | EVQLLESGGGLVQPGGSLRLSCAASGFTFSSYAMSWVRQAPGKGLE | 2149 |
| (Spike/ | | WVSAIRGSGGSTYYADSVKGRFTISRDNSKNTLYLQMNSLRAEDTAV | |
| RBD) | | YYCAKGVRSSDDYFEYWGQGTLVTVSSASTKGPSVFPLAPSSKSTSG | |
| | | GTAALGCLVKDYFPEPVTVSWNSGALTSGVHTFPAVLQSSGLYSLSS | |
| | | VVTVPSSSLGTQTYICNVNHKPSNTKVD~ | |
| | Heavy Chain | EVQLLESGGGLVQPGGSLRLSCAASGFTFSSYAMSWVRQAPGKGLE | 2150 |
| | Variable | WVSAIRGSGGSTYYADSVKGRFTISRDNSKNTLYLQMNSLRAEDTAV | |
| | Region | YYCAKGVRSSDDYFEYWGQGTLVTVSS | |
| | HCDR1 | SYAMS | 2151 |
| | HCDR2 | AIRGSGGSTYYADSVKG | 2152 |
| | HCDR3 | GVRSSDDYFEY | 2153 |
| | HFRW1 | EVQLLESGGGLVQPGGSLRLSCAASGFTFS | 2154 |
| | HFRW2 | WVRQAPGKGLEWVS | 2155 |
| | HFRW3 | RFTISRDNSKNTLYLQMNSLRAEDTAVYYCAK | 2156 |
| | HFRW4 | WGQGTLVTVSS | 2157 |
| | Light Chain | DIQMTQSPSTLSASVGDRVTITCRASQSITSWLAWYQQKPGKAPKLLI | 2158 |
| | | YDASSLESGVPSRFSGSGSGTEFTLTISSLQPDDFATYYCQHYNSYPW | |
| | | TFGQGTKVEIKRTVAAPSVFIFPPSDEQLKSGTASVVCLLNNFYPREA | |
| | | KVQWKVDNALQSGNSQESVTEQDSKDSTYSLSSTLTLSKADYE~ | |
| | Light Chain | DIQMTQSPSTLSASVGDRVTITCRASQSITSWLAWYQQKPGKAPKLLI | 2159 |
| | Variable | YDASSLESGVPSRFSGSGSGTEFTLTISSLQPDDFATYYCQHYNSYPW | |
| | Region | TFGQGTKVEIK | |
| | LCDR1 | RASQSITSWLA | 2160 |
| | LCDR2 | DASSLES | 2161 |
| | LCDR3 | QHYNSYPWT | 2162 |
| | LFRW1 | DIQMTQSPSTLSASVGDRVTITC | 2163 |
| | LFRW2 | WYQQKPGKAPKLLIY | 2164 |
| | LFRW3 | GVPSRFSGSGSGTEFTLTISSLQPDDFATYYC | 2165 |
| | LFRW4 | FGQGTKVEIK | 2166 |
| S210-1139 | Heavy Chain | EVQLVQSGAEVKKPGESLKISCKGSGYYFPSYWIGWVRQKPGNGPE | 2167 |
| (Spike) | | WMGIIHPGDSESTYSPSFQGQVTISADKSISTAYLQWSSLKASDTAMY | |
| | | YCARPFYYGSESPPGYWGQGTLVTVSSGSASAPTLFPLVSCENSPSDT | |
| | | SSV | |
| | Heavy Chain | EVQLVQSGAEVKKPGESLKISCKGSGYYFPSYWIGWVRQKPGNGPE | 2168 |
| | Variable | WMGIIHPGDSESTYSPSFQGQVTISADKSISTAYLQWSSLKASDTAMY | |
| | Region | YCARPFYYGSESPPGYWGQGTLVTVSS | |
| | HCDR1 | SYWIG | 2169 |
| | HCDR2 | IIHPGDSESTYSPSFQG | 2170 |
| | HCDR3 | PFYYGSESPPGY | 2171 |
| | HFRW1 | EVQLVQSGAEVKKPGESLKISCKGSGYYFP | 2172 |
| | HFRW2 | WVRQKPGNGPEWMG | 2173 |
| | HFRW3 | QVTISADKSISTAYLQWSSLKASDTAMYYCAR | 2174 |
| | HFRW4 | WGQGTLVTVSS | 2175 |
| | Light Chain | EIVLTQSPGTLSLSPGERATLSCRASQSVSSSYLAWYQQKPGQAPRLLI | 2176 |
| | | YGASSRATGIPDRFSGSGSGTDFTLTISRLEAEDFAVYYCQLFGSSPTW | |
| | | TFGQGTKVEIKRTVAAPSVFIFPPSDEQLKSGTASVVCLLNNFYPREA | |
| | | KVQWKVDN~ | |
| | Light Chain | EIVLTQSPGTLSLSPGERATLSCRASQSVSSSYLAWYQQKPGQAPRLLI | 2177 |
| | Variable | YGASSRATGIPDRFSGSGSGTDFTLTISRLEAEDFAVYYCQLFGSSPTW | |
| | Region | TFGQGTKVEIK | |
| | LCDR1 | RASQSVSSSYLA | 2178 |
| | LCDR2 | GASSRAT | 2179 |
| | LCDR3 | QLFGSSPTWT | 2180 |
| | LFRW1 | EIVLTQSPGTLSLSPGERATLSC | 2181 |
| | LFRW2 | WYQQKPGQAPRLLIY | 2182 |
| | LFRW3 | GIPDRFSGSGSGTDFTLTISRLEAEDFAVYYC | 2183 |
| | LFRW4 | FGQGTKVEIK | 2184 |
| S210-1262 | Heavy Chain | QLQLQESGPGLMKPSETLSLTCTVSGGSISRSNYYWGWIRQPPGKGLE | 2185 |
| (Spike) | | WIGSIYYSGSTYYNPSLKSRVTISVDTSQNQFSLKMSSVTAADTAVYY | |
| | | CASLFDYGDNYWGQGTLVTVSSASTKGPSVFPLAPSSKS~ | |
| | Heavy Chain | QLQLQESGPGLMKPSETLSLTCTVSGGSISRSNYYWGWIRQPPGKGLE | 2186 |
| | Variable | WIGSIYYSGSTYYNPSLKSRVTISVDTSQNQFSLKMSSVTAADTAVYY | |
| | Region | CASLFDYGDNYWGQGTLVTVSS | |
| | HCDR1 | RSNYYWG | 2187 |
| | HCDR2 | SIYYSGSTYYNPSLKS | 2188 |
| | HCDR3 | LFDYGDNY | 2189 |
| | HFRW1 | QLQLQESGPGLMKPSETLSLTCTVSGGSIS | 2190 |
| | HFRW2 | WIRQPPGKGLEWIG | 2191 |
| | HFRW3 | RVTISVDTSQNQFSLKMSSVTAADTAVYYCAS | 2192 |
| | HFRW4 | WGQGTLVTVSS | 2193 |
| | Light Chain | QLVLTQSPSASASLGASVKLTCTLSSGHSSYAIAWHQQQPERGPRYL | 2194 |
| | | MKLNGDGSHSKGDGIPDRFSGSSSGAERYLTISSLQSEDEADYYCQT | |
| | | WGTDIQVFGGGTKLTVLGQPKAAPSVTLFPPSSEELQANKATLVCLIS | |
| | | DFYPGAVTVAWKADSSPVKAGVETTTPSKQSNNKYAASS~ | |
| | Light Chain | QLVLTQSPSASASLGASVKLTCTLSSGHSSYAIAWHQQQPERGPRYL | 2195 |
| | Variable | MKLNGDGSHSKGDGIPDRFSGSSSGAERYLTISSLQSEDEADYYCQT | |
| | Region | WGTDIQVFGGGTKLTVL | |
| | LCDR1 | TLSSGHSSYAIA | 2196 |
| | LCDR2 | LNGDGSHSKGD | 2197 |
| | LCDR3 | QTWGTDIQV | 2198 |
| | LFRW1 | QLVLTQSPSASASLGASVKLTC | 2199 |
| | LFRW2 | WHQQQPERGPRYLMK | 2200 |
| | LFRW3 | GIPDRFSGSSSGAERYLTISSLQSEDEADYYC | 2201 |
| | LFRW4 | FGGGTKLTVL | 2202 |
| S210-1611 | Heavy Chain | QVQLVQSGAEVKKPGSSVKVSCKASGGTFSSYAISWVRQARGQGLE | 2203 |
| (Spike) | | WMGGIIPIFGTANYPQKFQGRVTITADESTSTAYMELSSLRSEDTAVY | |
| | | YCARYHAYDSSGYYVDYWGQGTLVTVSSASPTSPKVFPLSLCSTQPD | |
| | | GNVVIACLVQGFFPQEPLSVTWSESGQGVTARNF~ | |
| | Heavy Chain | QVQLVQSGAEVKKPGSSVKVSCKASGGTFSSYAISWVRQARGQGLE | 2204 |
| | Variable | WMGGIIPIFGTANYPQKFQGRVTITADESTSTAYMELSSLRSEDTAVY | |
| | Region | YCARYHAYDSSGYYVDYWGQGTLVTVSS | |
| | HCDR1 | SYAIS | 2205 |
| | HCDR2 | GIIPIFGTANYPQKFQG | 2206 |
| | HCDR3 | YHAYDSSGYYVDY | 2207 |
| | HFRW1 | QVQLVQSGAEVKKPGSSVKVSCKASGGTFS | 2208 |
| | HFRW2 | WVRQARGQGLEWMG | 2209 |
| | HFRW3 | RVTITADESTSTAYMELSSLRSEDTAVYYCAR | 2210 |
| | HFRW4 | WGQGTLVTVSS | 2211 |
| | Light Chain | EIVLTQSPATLSLSPGERATLSCRASQSISSFLAWYQQKPGQAPRLLIY | 2212 |
| | | DASNRATGIPARFSGSGSGTDFILTINNLEPEDFAVYYCQQRSNWPPK | |
| | | LTFGGGTKVEIKRTVAAPSVFIFPPSDEQLKSGTASVVCLLNNFYPREA | |
| | | KVQWKVDN~ | |
| | Light Chain | EIVLTQSPATLSLSPGERATLSCRASQSISSFLAWYQQKPGQAPRLLIY | 2213 |
| | Variable | DASNRATGIPARFSGSGSGTDFILTINNLEPEDFAVYYCQQRSNWPPK | |
| | Region | LTFGGGTKVEIK | |
| | LCDR1 | RASQSISSFLA | 2214 |
| | LCDR2 | DASNRAT | 2215 |
| | LCDR3 | QQRSNWPPKLT | 2216 |
| | LFRW1 | EIVLTQSPATLSLSPGERATLSC | 2217 |
| | LFRW2 | WYQQKPGQAPRLLIY | 2218 |
| | LFRW3 | GIPARFSGSGSGTDFILTINNLEPEDFAVYYC | 2219 |
| | LFRW4 | FGGGTKVEIK | 2220 |
| S210-727 | Heavy Chain | QVQLQESGPGLVKPSETLSLTCTVSGGSMSSSYWSWIRQPPGKGLEWI | 2221 |
| (Spike) | | GYIYYRGSTNYNPSLKTRVTMSVDTSKNQFSMKMTFMTAADTAVYY | |
| | | CAREAAFNWFDSWGQGTLVTVSSGSASAPTLFPLVSCENSPSDTSSV | |
| | Heavy Chain | QVQLQESGPGLVKPSETLSLTCTVSGGSMSSSYWSWIRQPPGKGLEWI | 2222 |
| | Variable | GYIYYRGSTNYNPSLKTRVTMSVDTSKNQFSMKMTFMTAADTAVYY | |
| | Region | CAREAAFNWFDSWGQGTLVTVSS | |
| | HCDR1 | SSYWS | 2223 |
| | HCDR2 | YIYYRGSTNYNPSLKT | 2224 |
| | HCDR3 | EAAFNWFDS | 2225 |
| | HFRW1 | QVQLQESGPGLVKPSETLSLTCTVSGGSMS | 2226 |
| | HFRW2 | WIRQPPGKGLEWIG | 2227 |
| | HFRW3 | RVTMSVDTSKNQFSMKMTFMTAADTAVYYCAR | 2228 |
| | HFRW4 | WGQGTLVTVSS | 2229 |
| | Light Chain | DIQMTQSPSSLSASVGDRVTITCRASQGISSYLAWFQQKPGKAPKSLIY | 2230 |
| | | AASSLQSGVPSKFSGSGSGTDFTLTISSLQPEDFATYYCQQYNRYPPTF | |
| | | GGGTKVEIKRTVAAPSVFIFPPSDEQLKSGTASVVCLLNNFYPREAKV | |
| | | QWKVDN~ | |
| | Light Chain | DIQMTQSPSSLSASVGDRVTITCRASQGISSYLAWFQQKPGKAPKSLIY | 2231 |
| | Variable | AASSLQSGVPSKFSGSGSGTDFTLTISSLQPEDFATYYCQQYNRYPPTF | |
| | Region | GGGTKVEI | |
| | LCDR1 | RASQGISSYLA | 2232 |
| | LCDR2 | AASSLQS | 2233 |
| | LCDR3 | QQYNRYPPT | 2234 |
| | LFRW1 | DIQMTQSPSSLSASVGDRVTITC | 2235 |
| | LFRW2 | WFQQKPGKAPKSLIY | 2236 |
| | LFRW3 | GVPSKFSGSGSGTDFTLTISSLQPEDFATYYC | 2237 |
| | LFRW4 | FGGGTKVEI | 2238 |
| S210-852 | Heavy Chain | EVQLVESGGGLVQPGGSLRLSCAASGFTLSIYWMSWVRQAPGKGLE | 2239 |
| (Spike) | | WVANIKQDGREKYHVDSVKGRFTISRDNANNSLYLQMNNLRAEDTA | |
| | | VYFCARDGIAVAGGFDYWGQGTLVTVSSGSASAPTLFPLVSCENSPS | |
| | | DTSSV | |
| | Heavy Chain | EVQLVESGGGLVQPGGSLRLSCAASGFTLSIYWMSWVRQAPGKGLE | 2240 |
| | Variable | WVANIKQDGREKYHVDSVKGRFTISRDNANNSLYLQMNNLRAEDTA | |
| | Region | VYFCARDGIAVAGGFDYWGQGTLVTVSS | |
| | HCDR1 | IYWMS | 2241 |
| | HCDR2 | NIKQDGREKYHVDSVKG | 2242 |
| | HCDR3 | DGIAVAGGFDY | 2243 |
| | HFRW1 | EVQLVESGGGLVQPGGSLRLSCAASGFTLS | 2244 |
| | HFRW2 | WVRQAPGKGLEWVA | 2245 |
| | HFRW3 | RFTISRDNANNSLYLQMNNLRAEDTAVYFCAR | 2246 |
| | HFRW4 | WGQGTLVTVSS | 2247 |
| | Light Chain | SYELTQPPSVSVSPGQTASITCSGDKLGDTYACWYQQKPGQSPVLVIY | 2248 |
| | | QDSKRPSGIPERFSGSNSGNTATLTISGTQAMDEADYYCQAWDSSTSV | |
| | | VFGGGTKLTVLGQPKAAPSVTLFPPSSEELQANKATLVCLISDFYPGA | |
| | | VTVAWKADSSPVKAGVETTTPSKQSNNKYAASS~ | |
| | Light Chain | SYELTQPPSVSVSPGQTASITCSGDKLGDTYACWYQQKPGQSPVLVIY | 2249 |
| | Variable | QDSKRPSGIPERFSGSNSGNTATLTISGTQAMDEADYYCQAWDSSTSV | |
| | Region | VFGGGTKLTVL | |
| | LCDR1 | SGDKLGDTYAC | 2250 |
| | LCDR2 | QDSKRPS | 2251 |
| | LCDR3 | QAWDSSTSVV | 2252 |
| | LFRW1 | SYELTQPPSVSVSPGQTASITC | 2253 |
| | LFRW2 | WYQQKPGQSPVLVIY | 2254 |
| | LFRW3 | GIPERFSGSNSGNTATLTISGTQAMDEADYYC | 2255 |
| | LFRW4 | FGGGTKLTVL | 2256 |
| S210-896 | Heavy Chain | QVQLVESGGGVVQPGRSLRLSCAASGFTFSSYAMHWVRQAPGKGLE | 2257 |
| (Spike) | | WVAVISYDGGNKYYADSVKGRFTISRDNSKNTLYLQMNSLRAEDTA | |
| | | VYYCARGHGNYLTYFDYWGQGTLVTVSSGSASAPTLFPLVSCENSPS | |
| | | DTSSV | |
| | Heavy Chain | QVQLVESGGGVVQPGRSLRLSCAASGFTFSSYAMHWVRQAPGKGLE | 2258 |
| | Variable | WVAVISYDGGNKYYADSVKGRFTISRDNSKNTLYLQMNSLRAEDTA | |
| | Region | VYYCARGHGNYLTYFDYWGQGTLVTVSS | |
| | HCDR1 | SYAMH | 2259 |
| | HCDR2 | VISYDGGNKYYADSVKG | 2260 |
| | HCDR3 | GHGNYLTYFDY | 2261 |
| | HFRW1 | QVQLVESGGGVVQPGRSLRLSCAASGFTFS | 2262 |
| | HFRW2 | WVRQAPGKGLEWVA | 2263 |
| | HFRW3 | RFTISRDNSKNTLYLQMNSLRAEDTAVYYCAR | 2264 |
| | HFRW4 | WGQGTLVTVSS | 2265 |
| | Light Chain | EIVLTQSPGTLSLSPGERATLSCRASQSISSNYLAWYQQKPGQAPRLLI | 2266 |
| | | YGASSRATGIPDRFSGSGSGTDFTLTISRLEPEDFAVYYCQQYGSSPLT | |
| | | FGPGTKVDIKRTVAAPSVFIFPPSDEQLKSGTASVVCLLNNFYPREAK | |
| | | VQWKVDN | |
| | Light Chain | EIVLTQSPGTLSLSPGERATLSCRASQSISSNYLAWYQQKPGQAPRLLI | 2267 |
| | Variable | YGASSRATGIPDRFSGSGSGTDFTLTISRLEPEDFAVYYCQQYGSSPLT | |
| | Region | FGPGTKVDIK | |
| | LCDR1 | RASQSISSNYLA | 2268 |
| | LCDR2 | GASSRAT | 2269 |
| | LCDR3 | QQYGSSPLT | 2270 |
| | LFRW1 | EIVLTQSPGTLSLSPGERATLSC | 2271 |
| | LFRW2 | WYQQKPGQAPRLLIY | 2272 |
| | LFRW3 | GIPDRFSGSGSGTDFTLTISRLEPEDFAVYYC | 2273 |
| | LFRW4 | FGPGTKVDIK | 2274 |
| S2141-113 | Heavy Chain | EVQLVESGGGLVQPGGSLRLSCAASGFTFSSSWIHWVRQAPGKGLV | 2275 |
| (Spike/ | | WVSRINSDGSSTTYADSVKGRFTISRDNAKNTLFLQMNSLRAEDTAV | |
| RBD) | | YYCARAEWLRGQFDYWGQGTLVTVSSPPTKAPDVFPIISGCRHPKDN | |
| | | SPVVLACLITGYHPTSVTVTWYMGTQSQPQRTFPEIQRRDSYYMTSSQ | |
| | | LSTPLQQWRQGEYKCVVQ~ | |
| | Heavy Chain | EVQLVESGGGLVQPGGSLRLSCAASGFTFSSSWIHWVRQAPGKGLV | 2276 |
| | Variable | WVSRINSDGSSTTYADSVKGRFTISRDNAKNTLFLQMNSLRAEDTAV | |
| | Region | YYCARAEWLRGQFDYWGQGTLVTVSS | |
| | HCDR1 | SSWIH | 2277 |
| | HCDR2 | RINSDGSSTTYADSVKG | 2278 |
| | HCDR3 | AEWLRGQFDY | 2279 |
| | HFRW1 | EVQLVESGGGLVQPGGSLRLSCAASGFTFS | 2280 |
| | HFRW2 | WVRQAPGKGLVWVS | 2281 |
| | HFRW3 | RFTISRDNAKNTLFLQMNSLRAEDTAVYYCAR | 2282 |
| | HFRW4 | WGQGTLVTVSS | 2283 |
| | Light Chain | NFMLTQPHSVSESPGKTVTISCTGSSGSIASNYVQWYQQRPGSAPTTVI | 2284 |
| | | YEDNQRPSGVPDRFSGSIDSSSNSASLTISGLKTEDEADYYCQSYDTSN | |
| | | HVVFGGGTKLTVLGQPKAAPSVTLFPPSSEELQANKATLVCLISDFYP | |
| | | GAVTVAWKADSSPVKAGVETTTPSKQSNNKYAASSYLSLTPEQWKS | |
| | | H~ | |
| | Light Chain | NFMLTQPHSVSESPGKTVTISCTGSSGSIASNYVQWYQQRPGSAPTTVI | 2285 |
| | Variable | YEDNQRPSGVPDRFSGSIDSSSNSASLTISGLKTEDEADYYCQSYDTSN | |
| | Region | HVVFGGGTKLTVL | |
| | LCDR1 | TGSSGSIASNYVQ | 2286 |
| | LCDR2 | EDNQRPS | 2287 |
| | LCDR3 | QSYDTSNHVV | 2288 |
| | LFRW1 | NFMLTQPHSVSESPGKTVTISC | 2289 |
| | LFRW2 | WYQQRPGSAPTTVIY | 2290 |
| | LFRW3 | GVPDRFSGSIDSSSNSASLTISGLKTEDEADYYC | 2291 |
| | LFRW4 | FGGGTKLTVL | 2292 |
| S2141-126 | Heavy Chain | EVQLVQSGAEVKNPGESLKISCKGSGYRFTTYWIGWVRQMPGKGLE | 2293 |
| (Spike/ | | WMGIIYPGDSDTRYSPSFEGQVTISADKSISTAYLQWSSLKASDTAMY | |
| RBD) | | YCARHPLGLGGSIDYWGQGTLVTVSSASTKGPSVFPLAPSSKSTSGGT | |
| | | AALGCLVKDYFPEPVTVSWNSGALTSGVHTFPAVLQSSGLYSLSSVV | |
| | | TVPSSSLGTQTYICNVNHKPTLVLLGL*F~ | |
| | Heavy Chain | EVQLVQSGAEVKNPGESLKISCKGSGYRFTTYWIGWVRQMPGKGLE | 2294 |
| | Variable | WMGIIYPGDSDTRYSPSFEGQVTISADKSISTAYLQWSSLKASDTAMY | |
| | Region | YCARHPLGLGGSIDYWGQGTLVTVSS | |
| | HCDR1 | TYWIG | 2295 |
| | HCDR2 | IIYPGDSDTRYSPSFEG | 2296 |
| | HCDR3 | HPLGLGGSIDY | 2297 |
| | HFRW1 | EVQLVQSGAEVKNPGESLKISCKGSGYRFT | 2298 |
| | HFRW2 | WVRQMPGKGLEWMG | 2299 |
| | HFRW3 | QVTISADKSISTAYLQWSSLKASDTAMYYCAR | 2300 |
| | HFRW4 | WGQGTLVTVSS | 2301 |
| | Light Chain | DIQMTQSPSTLSASVGDRVTITCRASQSISSWLAWYQQKPGKAPKLLI | 2302 |
| | | YDASSLESGVPSRFSGSGSGTEFTLTISSLQPDDFATYYCQQYNSHWT | |
| | | FGQGTKVEIKRTVAAPSVFIFPPSDEQLKSGTASVVCLLNNFYPREAK | |
| | | VQWKVDNALQSGNSQESVTEQDSKDSTYSLSSTLTLSKADYE~ | |
| | Light Chain | DIQMTQSPSTLSASVGDRVTITCRASQSISSWLAWYQQKPGKAPKLLI | 2303 |
| | Variable | YDASSLESGVPSRFSGSGSGTEFTLTISSLQPDDFATYYCQQYNSHWT | |
| | Region | FGQGTKVEIK | |
| | LCDR1 | RASQSISSWLA | 2304 |
| | LCDR2 | DASSLES | 2305 |
| | LCDR3 | QQYNSHWT | 2306 |
| | LFRW1 | DIQMTQSPSTLSASVGDRVTITC | 2307 |
| | LFRW2 | WYQQKPGKAPKLLIY | 2308 |
| | LFRW3 | GVPSRFSGSGSGTEFTLTISSLQPDDFATYYC | 2309 |
| | LFRW4 | FGQGTKVEIK | 2310 |
| S2141-16 | Heavy Chain | QVQLQQWGAGLLKPSETLSRTCAVYGGSFSGYYWSWIRQTPGKGLE | 2311 |
| (Spike) | | WIGEINHDGSTIYNPSLKSRVTISIDTSKNQFSLQLSSVTAADTAVYYC | |
| | | ARGSNPGDYWGQGALVTVSSAPTKAPDVFPIISGCRHPKDNSPVVLA | |
| | | CLITGYHPT~ | |
| | Heavy Chain | QVQLQQWGAGLLKPSETLSRTCAVYGGSFSGYYWSWIRQTPGKGLE | 2312 |
| | Variable | WIGEINHDGSTIYNPSLKSRVTISIDTSKNQFSLQLSSVTAADTAVYYC | |
| | Region | ARGSNPGDYWGQGALVTVSS | |
| | HCDR1 | GYYWS | 2313 |
| | HCDR2 | EINHDGSTIYNPSLKS | 2314 |
| | HCDR3 | GSNPGDY | 2315 |
| | HFRW1 | QVQLQQWGAGLLKPSETLSRTCAVYGGSFS | 2316 |
| | HFRW2 | WIRQTPGKGLEWIG | 2317 |
| | HFRW3 | RVTISIDTSKNQFSLQLSSVTAADTAVYYCAR | 2318 |
| | HFRW4 | WGQGALVTVSS | 2319 |
| | Light Chain | SYELTQSLSVSVALGQTARIPCGGNNIGSKNVHWYQQKPGQAPVLVI | 2320 |
| | | YSDRNRPSGIPERFSGSNSGNTATLTISRAQAGDEADYYCQVWDSSSV | |
| | | VFGGGTKLTVLRQPKAAPSVTLFPPSSEELQANKATLVCLISDFYPGA | |
| | | VTVAWKADSSPVKAGVETTTPSKQSNNKYAASSYLSLTPEQWKSH~ | |
| | Light Chain | SYELTQSLSVSVALGQTARIPCGGNNIGSKNVHWYQQKPGQAPVLVI | 2321 |
| | Variable | YSDRNRPSGIPERFSGSNSGNTATLTISRAQAGDEADYYCQVWDSSSV | |
| | Region | VFGGGTKLTVL | |
| | LCDR1 | GGNNIGSKNVH | 2322 |
| | LCDR2 | SDRNRPS | 2323 |
| | LCDR3 | QVWDSSSVV | 2324 |
| | LFRW1 | SYELTQSLSVSVALGQTARIPC | 2325 |
| | LFRW2 | WYQQKPGQAPVLVIY | 2326 |
| | LFRW3 | GIPERFSGSNSGNTATLTISRAQAGDEADYYC | 2327 |
| | LFRW4 | FGGGTKLTVL | 2328 |
| S2141-62 | Heavy Chain | QVHLQESGPGLVKPSQTLSLTCTVSGVSITTSGSYWSWIRQCPGKGLE | 2329 |
| (Spike/ | | WIGYIYSTGTTYYSPSLKSRLTISLDTSRNQFSLNLSSVTAADTAVFFC | |
| RBD) | | ARKTYMDYFDYWGQGALITVSSASTKGPSVFPLAPSSKSTSGGTAAL | |
| | | GCLVKDYFPEPVTVSWNSGALTSGVHTFPAVLQSSG | |
| | Heavy Chain | QVHLQESGPGLVKPSQTLSLTCTVSGVSITTSGSYWSWIRQCPGKGLE | 2330 |
| | Variable | WIGYIYSTGTTYYSPSLKSRLTISLDTSRNQFSLNLSSVTAADTAVFFC | |
| | Region | ARKTYMDYFDYWGQGALITVSS | |
| | HCDR1 | TSGSYWS | 2331 |
| | HCDR2 | YIYSTGTTYYSPSLKS | 2332 |
| | HCDR3 | KTYMDYFDY | 2333 |
| | HFRW1 | QVHLQESGPGLVKPSQTLSLTCTVSGVSIT | 2334 |
| | HFRW2 | WIRQCPGKGLEWIG | 2335 |
| | HFRW3 | RLTISLDTSRNQFSLNLSSVTAADTAVFFCAR | 2336 |
| | HFRW4 | WGQGALITVSS | 2337 |
| | Light Chain | QSALTQPTSVSGSPGQSITISCTGTSSDVGRYNLVSWYQQYPGKAPKLI | 2338 |
| | | IFEVSKRPSGVSDRFSASKSGNTASLTISGLQADDEADYYCCTYALTFL | |
| | | FGGGTKVTVLGQPKAAPSVTLFPPSSEELQANKATLVCLISDFYPGAV | |
| | | TVAWKADSSPVKAGVETTTPSKQSNNKYAASSYLSLTPEQWKSH | |
| | Light Chain | QSALTQPTSVSGSPGQSITISCTGTSSDVGRYNLVSWYQQYPGKAPKLI | 2339 |
| | Variable | IFEVSKRPSGVSDRFSASKSGNTASLTISGLQADDEADYYCCTYALTFL | |
| | Region | FGGGTKVTVL | |
| | LCDR1 | TGTSSDVGRYNLVS | 2340 |
| | LCDR2 | EVSKRPS | 2341 |
| | LCDR3 | CTYALTFL | 2342 |
| | LFRW1 | QSALTQPTSVSGSPGQSITISC | 2343 |
| | LFRW2 | WYQQYPGKAPKLIIF | 2344 |
| | LFRW3 | GVSDRFSASKSGNTASLTISGLQADDEADYYC | 2345 |
| | LFRW4 | FGGGTKVTVL | 2346 |
| S2141-63 | Heavy Chain | EVQLLESGGGLVQPGGSLRLSCAASGFTFYDYAMNWVRQTPGEGLE | 2347 |
| (Spike/ | | WVSAISGSGDPTYYADSVNGRFTISRDNSKNTLYLQMNSLRAEDTAI | |
| RBD) | | YYCAKDMEDFGFSWGQGTLVTVSSAPTKAPDVFPIISGCRHPKDNSP | |
| | | VVLACLITGYHPTSVTVTWYM~ | |
| | Heavy Chain | EVQLLESGGGLVQPGGSLRLSCAASGFTFYDYAMNWVRQTPGEGLE | 2348 |
| | Variable | WVSAISGSGDPTYYADSVNGRFTISRDNSKNTLYLQMNSLRAEDTAI | |
| | Region | YYCAKDMEDFGFSWGQGTLVTVSS | |
| | HCDR1 | DYAMN | 2349 |
| | HCDR2 | AISGSGDPTYYADSVNG | 2350 |
| | HCDR3 | DMEDFGFS | 2351 |
| | HFRW1 | EVQLLESGGGLVQPGGSLRLSCAASGFTFY | 2352 |
| | HFRW2 | WVRQTPGEGLEWVS | 2353 |
| | HFRW3 | RFTISRDNSKNTLYLQMNSLRAEDTAIYYCAK | 2354 |
| | HFRW4 | WGQGTLVTVSS | 2355 |
| | Light Chain | DIQMTQSPSSLSASVGDRVTITCRSGQSISTYLNWYQQKPGKAPKLLI | 2356 |
| | | YASSSLQSGVPSRFSGSGSGTDFTLTISSLQPEDFATYYCQQSFLPPRTF | |
| | | GQGTKLEIKRTVAAPSVFIFPPSDEQLKSGTASVVCLLNNFYPREAKV | |
| | | QWKVDNALQSGNSQESVTEQDSKDSTYSLSSTLTLSKADYE~ | |
| | Light Chain | DIQMTQSPSSLSASVGDRVTITCRSGQSISTYLNWYQQKPGKAPKLLI | 2357 |
| | Variable | YASSSLQSGVPSRFSGSGSGTDFTLTISSLQPEDFATYYCQQSFLPPRTF | |
| | Region | GQGTKLEIK | |
| | LCDR1 | RSGQSISTYLN | 2358 |
| | LCDR2 | ASSSLQS | 2359 |
| | LCDR3 | QQSFLPPRT | 2360 |
| | LFRW1 | DIQMTQSPSSLSASVGDRVTITC | 2361 |
| | LFRW2 | WYQQKPGKAPKLLIY | 2362 |
| | LFRW3 | GVPSRFSGSGSGTDFTLTISSLQPEDFATYYC | 2363 |
| | LFRW4 | FGQGTKLEIK | 2364 |
| S2141-65 | Heavy Chain | DVQLVQSGAEVTKPGESLKISCKGSGYSFTTYWIGWVRQMPGKGLE | 2365 |
| (Spike) | | WMGIIYPGDSDTRYSPSFQGQVTISVDKSISTAYLQWSSLKASDTAMY | |
| | | YCARQFCGGDCPFDYWGRGTLVTVSSASTKGPSVFPLAPCSRSTSGG | |
| | | TAALGCLVKDYFPEPVTVSWNSGALTSGVHTFPAVLQSSGLYSLSSV | |
| | | VTVPSSSLGTQTYTCNVNHKPSNTKVD~ | |
| | Heavy Chain | DVQLVQSGAEVTKPGESLKISCKGSGYSFTTYWIGWVRQMPGKGLE | 2366 |
| | Variable | WMGIIYPGDSDTRYSPSFQGQVTISVDKSISTAYLQWSSLKASDTAMY | |
| | Region | YCARQFCGGDCPFDYWGRGTLVTVSS | |
| | HCDR1 | TYWIG | 2367 |
| | HCDR2 | IIYPGDSDTRYSPSFQG | 2368 |
| | HCDR3 | QFCGGDCPFDY | 2369 |
| | HFRW1 | DVQLVQSGAEVTKPGESLKISCKGSGYSFT | 2370 |
| | HFRW2 | WVRQMPGKGLEWMG | 2371 |
| | HFRW3 | QVTISVDKSISTAYLQWSSLKASDTAMYYCAR | 2372 |
| | HFRW4 | WGRGTLVTVSS | 2373 |
| | Light Chain | DIQMTQSPSTLSASVGDRVTITCRASQSISSWLAWYQQKPGKAPKLLI | 2374 |
| | | YDASSLEGGVPSRFSGSGSGTEFTLTISSLQPDDFATYYCQQYNSYPRT | |
| | | FGQGTKVEIKRTVAAPSVFIFPPSDEQLKSGTASVVCLLNNFYPREAK | |
| | | VQWKVDNALQSGNSQESVTEQDSKDSTYSLSSTLTLSKADYE~ | |
| | Light Chain | DIQMTQSPSTLSASVGDRVTITCRASQSISSWLAWYQQKPGKAPKLLI | 2375 |
| | Variable | YDASSLEGGVPSRFSGSGSGTEFTLTISSLQPDDFATYYCQQYNSYPRT | |
| | Region | FGQGTKVEIK | |
| | LCDR1 | RASQSISSWLA | 2376 |
| | LCDR2 | DASSLEG | 2377 |
| | LCDR3 | QQYNSYPRT | 2378 |
| | LFRW1 | DIQMTQSPSTLSASVGDRVTITC | 2379 |
| | LFRW2 | WYQQKPGKAPKLLIY | 2380 |
| | LFRW3 | GVPSRFSGSGSGTEFTLTISSLQPDDFATYYC | 2381 |
| | LFRW4 | FGQGTKVEIK | 2382 |
| S2141-97 | Heavy Chain | QVQLVQSGAEVKKPGASVKVSCKASGYTFTRYGMHWVRQAPGQRL | 2383 |
| (Spike/ | | KWMGWINAGNGNTKYSQKFQGRLTISRDTSASTAYMEVSSLRSEDT | |
| RBD) | | AVYYCARSGIAAAGSKVIYYYDMDVWGQGTTVTVSSAPTKAPDVFPI | |
| | | ISGCRHPKDNSPVVLACLITGYHPTSVTVTWYMGTQSQPQRTFPEIQR | |
| | | RDSYYMTSSQLSTPLQQWRQGEYKCVVQ~ | |
| | Heavy Chain | QVQLVQSGAEVKKPGASVKVSCKASGYTFTRYGMHWVRQAPGQRL | 2384 |
| | Variable | KWMGWINAGNGNTKYSQKFQGRLTISRDTSASTAYMEVSSLRSEDT | |
| | Region | AVYYCARSGIAAAGSKVIYYYDMDVWGQGTTVTVSS | |
| | HCDR1 | RYGMH | 2385 |
| | HCDR2 | WINAGNGNTKYSQKFQG | 2386 |
| | HCDR3 | SGIAAAGSKVIYYYDMDV | 2387 |
| | HFRW1 | QVQLVQSGAEVKKPGASVKVSCKASGYTFT | 2388 |
| | HFRW2 | WVRQAPGQRLKWMG | 2389 |
| | HFRW3 | RLTISRDTSASTAYMEVSSLRSEDTAVYYCAR | 2390 |
| | HFRW4 | WGQGTTVTVSS | 2391 |
| | Light Chain | EIVLTQSPGTLSLSPGERATLSCRASQRVSSSYIAWYQQKPGQAPRLLI | 2392 |
| | | FGTSSRATGIPDRFSGSGSGTDFTLTISRLEPEDFALYYCQQYGSSPYTF | |
| | | GQGTKLEIKRTVAAPSVFIFPPSDEQLKSGTASVVCLLNNFYPREAKV | |
| | | QWKVDNALQSGNSQESVTEQDSKDSTYSLSSTLTLSKADYE~ | |
| | Light Chain | EIVLTQSPGTLSLSPGERATLSCRASQRVSSSYIAWYQQKPGQAPRLLI | 2393 |
| | Variable | FGTSSRATGIPDRFSGSGSGTDFTLTISRLEPEDFALYYCQQYGSSPYTF | |
| | Region | GQGTKLEIK | |
| | LCDR1 | RASQRVSSSYIA | 2394 |
| | LCDR2 | GTSSRAT | 2395 |
| | LCDR3 | QQYGSSPYT | 2396 |
| | LFRW1 | EIVLTQSPGTLSLSPGERATLSC | 2397 |
| | LFRW2 | WYQQKPGQAPRLLIF | 2398 |
| | LFRW3 | GIPDRFSGSGSGTDFTLTISRLEPEDFALYYC | 2399 |
| | LFRW4 | FGQGTKLEIK | 2400 |
| S24_342 | Heavy Chain | QVQLVQSGAEVKMPGASVIVSCKASGYTFSTYYIHWVRQAPGQGLE | 2401 |
| (Spike/ | | WMGRITPRDGDTTYAQVLQGRVTLTRDTSASTAYMELSSLTYEDTA | |
| RBD) | | VYYCARDGHHWDFDFWGRGTLVAVSSASTKGPSVFPLAPCSRSTSES | |
| | | TAALGCLVKDYFPEPVTVSWNSGALTSGVHTFPAVLQSS | |
| | Heavy Chain | QVQLVQSGAEVKMPGASVIVSCKASGYTFSTYYIHWVRQAPGQGLE | 2402 |
| | Variable | WMGRITPRDGDTTYAQVLQGRVTLTRDTSASTAYMELSSLTYEDTA | |
| | Region | VYYCARDGHHWDFDFWGRGTLVAVSS | |
| | HCDR1 | TYYIH | 2403 |
| | HCDR2 | RITPRDGDTTYAQVLQG | 2404 |
| | HCDR3 | DGHHWDFDF | 2405 |
| | HFRW1 | QVQLVQSGAEVKMPGASVIVSCKASGYTFS | 2406 |
| | HFRW2 | WVRQAPGQGLEWMG | 2407 |
| | HFRW3 | RVTLTRDTSASTAYMELSSLTYEDTAVYYCAR | 2408 |
| | HFRW4 | WGRGTLVAVSS | 2409 |
| | Light Chain | HSALTQPPSASGSPGQSVTISCTGTSSDVGGYNHVSWYQQHPGKAPK | 2410 |
| | | LMVYEVNQRPSGVPDRFTGSKSGNTASLTVSGLQAEDEADYYCNSY | |
| | | TDRNKWVFGGGTRLTVLGQPKAAPSVTLFPPSSEELQANKATLVCLIS | |
| | | DFYPGAVTVAWKADSSPVKAGVETTTPSKQSNNKYAASS~ | |
| | Light Chain | HSALTQPPSASGSPGQSVTISCTGTSSDVGGYNHVSWYQQHPGKAPK | 2411 |
| | Variable | LMVYEVNQRPSGVPDRFTGSKSGNTASLTVSGLQAEDEADYYCNSY | |
| | Region | TDRNKWVFGGGTRLTVL | |
| | LCDR1 | TGTSSDVGGYNHVS | 2412 |
| | LCDR2 | EVNQRPS | 2413 |
| | LCDR3 | NSYTDRNKWV | 2414 |
| | LFRW1 | HSALTQPPSASGSPGQSVTISC | 2415 |
| | LFRW2 | WYQQHPGKAPKLMVY | 2416 |
| | LFRW3 | GVPDRFTGSKSGNTASLTVSGLQAEDEADYYC | 2417 |
| | LFRW4 | FGGGTRLTVL | 2418 |
| S24-1047 | Heavy Chain | QVQLKQSGAEVKEPGGSVKLSCKASGYTFTSRYIHWVRQAPGQGLE | 2419 |
| (Spike/ | | WVGRLIPSDGGTTYAQKFRGRVTMTSDTSATTAYMELSSLGSGDTAV | |
| RBD) | | YYCARDGTHWDFDFWGQGTLVTVSSASPTSPKVFPLSLDSTPQDGNV | |
| | | VVACLVQGFFPQEPLSVTWSESGQNVTARNF~ | |
| | Heavy Chain | QVQLKQSGAEVKEPGGSVKLSCKASGYTFTSRYIHWVRQAPGQGLE | 2420 |
| | Variable | WVGRLIPSDGGTTYAQKFRGRVTMTSDTSATTAYMELSSLGSGDTAV | |
| | Region | YYCARDGTHWDFDFWGQGTLVTVSS | |
| | HCDR1 | SRYIH | 2421 |
| | HCDR2 | RLIPSDGGTTYAQKFRG | 2422 |
| | HCDR3 | DGTHWDFDF | 2423 |
| | HFRW1 | QVQLKQSGAEVKEPGGSVKLSCKASGYTFT | 2424 |
| | HFRW2 | WVRQAPGQGLEWVG | 2425 |
| | HFRW3 | RVTMTSDTSATTAYMELSSLGSGDTAVYYCAR | 2426 |
| | HFRW4 | WGQGTLVTVSS | 2427 |
| | Light Chain | HSALTQPPSASGSPGQSVTISCTGTSDDVGGYNHVSWYQQHPGKAPK | 2428 |
| | | LVIYEVTERPSGVPDRFTGSKSGNTASLTVSGLQAEDEADYYCNSYK | |
| | | RGNTWVFGGGTRLTVLGQPKAAPSVTLFPPSSEELQANKATLVCLISD | |
| | | FYPGAVTVAWKADSSPVKAGVETTTPSKQSNNKYAASS~ | |
| | Light Chain | HSALTQPPSASGSPGQSVTISCTGTSDDVGGYNHVSWYQQHPGKAPK | 2429 |
| | Variable | LVIYEVTERPSGVPDRFTGSKSGNTASLTVSGLQAEDEADYYCNSYK | |
| | Region | RGNTWVFGGGTRLTVL | |
| | LCDR1 | TGTSDDVGGYNHVS | 2430 |
| | LCDR2 | EVTERPS | 2431 |
| | LCDR3 | NSYKRGNTWV | 2432 |
| | LFRW1 | HSALTQPPSASGSPGQSVTISC | 2433 |
| | LFRW2 | WYQQHPGKAPKLVIY | 2434 |
| | LFRW3 | GVPDRFTGSKSGNTASLTVSGLQAEDEADYYC | 2435 |
| | LFRW4 | FGGGTRLTVL | 2436 |
| S24-223 | Heavy Chain | QITLKESGPTLVKPTQTLTLTCTFSGFSLNTSGVGVGWIRQPPGKALE | 2437 |
| (Spike/ | | WLALIYWDDDKRYSPSLKSRLTITKDTSKNQVVLTMTNMDPVDTAT | |
| RBD) | | YYCAHHTIVPIFDYWGQGTLVTVSSGSASAPTLFPLVSCENSPSDTSSV | |
| | Heavy Chain | QITLKESGPTLVKPTQTLTLTCTFSGFSLNTSGVGVGWIRQPPGKALE | 2438 |
| | Variable | WLALIYWDDDKRYSPSLKSRLTITKDTSKNQVVLTMTNMDPVDTAT | |
| | Region | YYCAHHTIVPIFDYWGQGTLVTVSS | |
| | HCDR1 | TSGVGVG | 2439 |
| | HCDR2 | LIYWDDDKRYSPSLKS | 2440 |
| | HCDR3 | HTIVPIFDY | 2441 |
| | HFRW1 | QITLKESGPTLVKPTQTLTLTCTFSGFSLN | 2442 |
| | HFRW2 | WIRQPPGKALEWLA | 2443 |
| | HFRW3 | RLTITKDTSKNQVVLTMTNMDPVDTATYYCAH | 2444 |
| | HFRW4 | WGQGTLVTVSS | 2445 |
| | Light Chain | QSALTQPASVSGSPGQSITISCTGTSSDVGGYNYVSWYQQHPGKAPKL | 2446 |
| | | MIYDVSNRPSGVSNRFSGSKSGNTASLTISGLQAEDEADYYCNSYTSS | |
| | | STLVVFGGGTKLTVLGQPKAAPSVTLFPPSSEELQANKATLVCLISDF | |
| | | YPGAVTVAWKADSSPVKAGVETTTPSKQSNNKYAASSYLSLT~ | |
| | Light Chain | QSALTQPASVSGSPGQSITISCTGTSSDVGGYNYVSWYQQHPGKAPKL | 2447 |
| | Variable | MIYDVSNRPSGVSNRFSGSKSGNTASLTISGLQAEDEADYYCNSYTSS | |
| | Region | STLVVFGGGTKLTVL | |
| | LCDR1 | TGTSSDVGGYNYVS | 2448 |
| | LCDR2 | DVSNRPS | 2449 |
| | LCDR3 | NSYTSSSTLVV | 2450 |
| | LFRW1 | QSALTQPASVSGSPGQSITISC | 2451 |
| | LFRW2 | WYQQHPGKAPKLMIY | 2452 |
| | LFRW3 | GVSNRFSGSKSGNTASLTISGLQAEDEADYYC | 2453 |
| | LFRW4 | FGGGTKLTVL | 2454 |
| S24-237 | Heavy Chain | QVQLQESGPGLVKPSGTLSLTCSVSGGSINSSFWSWIRQPPGKGLEWI | 2455 |
| (Spike/ | | GYIYYRGSTNYNPSLKSRVTISVDTSNNQFSLKLTSMTAADSAVYYC | |
| RBD) | | ARETRYNWFDSWGQGTRVTVSSASTKGPSVFPLAPCSRSTSESTAAL | |
| | | GCLVKDYFPEPVTVSWNSGALTSGVHTFPAVLQSSG | |
| | Heavy Chain | QVQLQESGPGLVKPSGTLSLTCSVSGGSINSSFWSWIRQPPGKGLEWI | 2456 |
| | Variable | GYIYYRGSTNYNPSLKSRVTISVDTSNNQFSLKLTSMTAADSAVYYC | |
| | Region | ARETRYNWFDSWGQGTRVTVSS | |
| | HCDR1 | SSFWS | 2457 |
| | HCDR2 | YIYYRGSTNYNPSLKS | 2458 |
| | HCDR3 | ETRYNWFDS | 2459 |
| | HFRW1 | QVQLQESGPGLVKPSGTLSLTCSVSGGSIN | 2460 |
| | HFRW2 | WIRQPPGKGLEWIG | 2461 |
| | HFRW3 | RVTISVDTSNNQFSLKLTSMTAADSAVYYCAR | 2462 |
| | HFRW4 | WGQGTRVTVSS | 2463 |
| | Light Chain | DIVMTQSPDSLAVSLGERATINCKSSQTVSYTSNNKNYLAWYQQKPG | 2464 |
| | | QPPNLLIYWASTRESGVPDRFSGSGSGTDFTLTINSLQAEDVAVYYCQ | |
| | | QYYTTPWTFGQGTKVEIKRTVAAPSVFIFPPSDEQLKSGTASVVCLLN | |
| | | NFYPREAKVQWKVDN | |
| | Light Chain | DIVMTQSPDSLAVSLGERATINCKSSQTVSYTSNNKNYLAWYQQKPG | 2465 |
| | Variable | QPPNLLIYWASTRESGVPDRFSGSGSGTDFTLTINSLQAEDVAVYYCQ | |
| | Region | QYYTTPWTFGQGTKVEIK | |
| | LCDR1 | KSSQTVSYTSNNKNYLA | 2466 |
| | LCDR2 | WASTRES | 2467 |
| | LCDR3 | QQYYTTPWT | 2468 |
| | LFRW1 | DIVMTQSPDSLAVSLGERATINC | 2469 |
| | LFRW2 | WYQQKPGQPPNLLIY | 2470 |
| | LFRW3 | GVPDRFSGSGSGTDFTLTINSLQAEDVAVYYC | 2471 |
| | LFRW4 | FGQGTKVEIK | 2472 |
| S305-1456 | Heavy Chain | QVQLVQSGAEVKKPGASVKVSCKVSGYTLTELSMHWVRQAPGKGL | 2473 |
| (Spike) | | EWMGGFDPEDAETIYAQKFQGRVTMTEDTSTDTAYMELSSLRSEDT | |
| | | AVYYCATGGFPVNSLYDILTGYLDYWGQGTLVTVSSASTKGPSVFPL | |
| | | APCSRSTSESTAALGCLVKDYFPEPVTVSWNSGALTSGVHTFPAVLQS | |
| | | SG | |
| | Heavy Chain | QVQLVQSGAEVKKPGASVKVSCKVSGYTLTELSMHWVRQAPGKGL | 2474 |
| | Variable | EWMGGFDPEDAETIYAQKFQGRVTMTEDTSTDTAYMELSSLRSEDT | |
| | Region | AVYYCATGGFPVNSLYDILTGYLDYWGQGTLVTVSS | |
| | HCDR1 | ELSMH | 2475 |
| | HCDR2 | GFDPEDAETIYAQKFQG | 2476 |
| | HCDR3 | GGFPVNSLYDILTGYLDY | 2477 |
| | HFRW1 | QVQLVQSGAEVKKPGASVKVSCKVSGYTLT | 2478 |
| | HFRW2 | WVRQAPGKGLEWMG | 2479 |
| | HFRW3 | RVTMTEDTSTDTAYMELSSLRSEDTAVYYCAT | 2480 |
| | HFRW4 | WGQGTLVTVSS | 2481 |
| | Light Chain | EIVMTQSPATLSVSPGERATLSCRASQNVSSNLAWYQQKPGQAPRLLI | 2482 |
| | | YGASTRATGIPARFSGSGSGTEFTLTISSLQSEDFAVYYCQQYNNWPH | |
| | | TFGPGTKVDIKRTVAAPSVFIFPPSDEQLKSGTASVVCLLNNFYPREAK | |
| | | VQWKVDN~ | |
| | Light Chain | EIVMTQSPATLSVSPGERATLSCRASQNVSSNLAWYQQKPGQAPRLLI | 2483 |
| | Variable | YGASTRATGIPARFSGSGSGTEFTLTISSLQSEDFAVYYCQQYNNWPH | |
| | Region | TFGPGTKVDIK | |
| | LCDR1 | RASQNVSSNLA | 2484 |
| | LCDR2 | GASTRAT | 2485 |
| | LCDR3 | QQYNNWPHT | 2486 |
| | LFRW1 | EIVMTQSPATLSVSPGERATLSC | 2487 |
| | LFRW2 | WYQQKPGQAPRLLIY | 2488 |
| | LFRW3 | GIPARFSGSGSGTEFTLTISSLQSEDFAVYYC | 2489 |
| | LFRW4 | FGPGTKVDIK | 2490 |
| S305-223 | Heavy Chain | QVQLVESGGGVVQPGRSLRLSCAASGFTFRNFGMHWVRQAPGKGLE | 2491 |
| (Spike) | | WVAFIWTAESDKFYADSVKGRFTVSRDNSKNTLYLEMNSLRAEDTA | |
| | | VYYCTKAMDVWGRGTTVTVSSASPTSPKVFPLSLCSTQPDGNVVIAC | |
| | | LVQGFFPQEPLSVTWSESGQGVTARNF~ | |
| | Heavy Chain | QVQLVESGGGVVQPGRSLRLSCAASGFTFRNFGMHWVRQAPGKGLE | 2492 |
| | Variable | WVAFIWTAESDKFYADSVKGRFTVSRDNSKNTLYLEMNSLRAEDTA | |
| | Region | VYYCTKAMDVWGRGTTVTVSS | |
| | HCDR1 | NFGMH | 2493 |
| | HCDR2 | FIWTAESDKFYADSVKG | 2494 |
| | HCDR3 | AMDV | 2495 |
| | HFRW1 | QVQLVESGGGVVQPGRSLRLSCAASGFTFR | 2496 |
| | HFRW2 | WVRQAPGKGLEWVA | 2497 |
| | HFRW3 | RFTVSRDNSKNTLYLEMNSLRAEDTAVYYCTK | 2498 |
| | HFRW4 | WGRGTTVTVSS | 2499 |
| | Light Chain | EIVLTQSPATLSLSPGERATLSCRASQSVSTSLAWYQQKCGQAPRLLIY | 2500 |
| | | DASNRATGIPARFSGSGSGTDFTLTISSLEPEDFAVYYCQQRGNWPFTF | |
| | | GPGTRVDIKRTVAAPSVFIFPPSDEQLKSGTASVVCLLNNFYPREAKV | |
| | | QWKVDN~ | |
| | Light Chain | EIVLTQSPATLSLSPGERATLSCRASQSVSTSLAWYQQKCGQAPRLLIY | 2501 |
| | Variable | DASNRATGIPARFSGSGSGTDFTLTISSLEPEDFAVYYCQQRGNWPFTF | |
| | Region | GPGTRVDIK | |
| | LCDR1 | RASQSVSTSLA | 2502 |
| | LCDR2 | DASNRAT | 2503 |
| | LCDR3 | QQRGNWPFT | 2504 |
| | LFRW1 | EIVLTQSPATLSLSPGERATLSC | 2505 |
| | LFRW2 | WYQQKCGQAPRLLIY | 2506 |
| | LFRW3 | GIPARFSGSGSGTDFTLTISSLEPEDFAVYYC | 2507 |
| | LFRW4 | FGPGTRVDIK | 2508 |
| S305-399 | Heavy Chain | QVQLVQSGAEVKKPGASVKVSCKVSGYTLTELSMHWVRQAPGKGL | 2509 |
| (Spike) | | EWMGGFDPEDGETIYAQKFQGRVTMTEDTSTDTAYMELSSLRSEDT | |
| | | AVYYCATGGLGCSNGVCNNWFDPWGLGTLVTVSSGSASAPTLFPLV | |
| | | SCENSPSDTSSV | |
| | Heavy Chain | QVQLVQSGAEVKKPGASVKVSCKVSGYTLTELSMHWVRQAPGKGL | 2510 |
| | Variable | EWMGGFDPEDGETIYAQKFQGRVTMTEDTSTDTAYMELSSLRSEDT | |
| | Region | AVYYCATGGLGCSNGVCNNWFDPWGLGTLVTVSS | |
| | HCDR1 | ELSMH | 2511 |
| | HCDR2 | GFDPEDGETIYAQKFQG | 2512 |
| | HCDR3 | GGLGCSNGVCNNWFDP | 2513 |
| | HFRW1 | QVQLVQSGAEVKKPGASVKVSCKVSGYTLT | 2514 |
| | HFRW2 | WVRQAPGKGLEWMG | 2515 |
| | HFRW3 | RVTMTEDTSTDTAYMELSSLRSEDTAVYYCAT | 2516 |
| | HFRW4 | WGLGTLVTVSS | 2517 |
| | Light Chain | EIVMTQSPATLSVSPGERATLSCRASQSITSNLAWYQQKPGQAPRLLI | 2518 |
| | | YGASTRATGIPARFSGSGSGTEFTLTISNLQSEDFAVYYCQQYNNWPL | |
| | | TFGQGTKVEIKRTVAAPSVFIFPPSDEQLKSGTASVVCLLNNFYPREA | |
| | | KVQWKVDNALQSGNSQESVTEQDS~ | |
| | Light Chain | EIVMTQSPATLSVSPGERATLSCRASQSITSNLAWYQQKPGQAPRLLI | 2519 |
| | Variable | YGASTRATGIPARFSGSGSGTEFTLTISNLQSEDFAVYYCQQYNNWPL | |
| | Region | TFGQGTKVEIK | |
| | LCDR1 | RASQSITSNLA | 2520 |
| | LCDR2 | GASTRAT | 2521 |
| | LCDR3 | QQYNNWPLT | 2522 |
| | LFRW1 | EIVMTQSPATLSVSPGERATLSC | 2523 |
| | LFRW2 | WYQQKPGQAPRLLIY | 2524 |
| | LFRW3 | GIPARFSGSGSGTEFTLTISNLQSEDFAVYYC | 2525 |
| | LFRW4 | FGQGTKVEIK | 2526 |
| S305-968 | Heavy Chain | EVQLVESGGGLVQPGGSLRLSCAASGFTFSSYWMSWVRQAPGKGLE | 2527 |
| (Spike) | | WVANIKQDGSEKYYVDSVKGRFTISRDNAKNSLYLQMNSLRAEDTA | |
| | | VYYCARDSIAVAGGFDYWGQGTLVTVSSGSASAPTLFPLVSCENSPS | |
| | | DTSSV | |
| | Heavy Chain | EVQLVESGGGLVQPGGSLRLSCAASGFTFSSYWMSWVRQAPGKGLE | 2528 |
| | Variable | WVANIKQDGSEKYYVDSVKGRFTISRDNAKNSLYLQMNSLRAEDTA | |
| | Region | VYYCARDSIAVAGGFDYWGQGTLVTVSS | |
| | HCDR1 | SYWMS | 2529 |
| | HCDR2 | NIKQDGSEKYYVDSVKG | 2530 |
| | HCDR3 | DSIAVAGGFDY | 2531 |
| | HFRW1 | EVQLVESGGGLVQPGGSLRLSCAASGFTFS | 2532 |
| | HFRW2 | WVRQAPGKGLEWVA | 2533 |
| | HFRW3 | RFTISRDNAKNSLYLQMNSLRAEDTAVYYCAR | 2534 |
| | HFRW4 | WGQGTLVTVSS | 2535 |
| | Light Chain | SYELTQPPSVSVSPGQTASITCSGDKLGDKYACWYQQKPGQSPVLVIY | 2536 |
| | | QDSKRPSGIPERFSGSNSGNTATLTISGTQAMDEADYYCQAWDSSTN | |
| | | VVFGGGTKLTVLGQPKAAPSVTLFPPSSEELQANKATLVCLISDFYPG | |
| | | AVTVAWKADSSPVKAGVETTTPSKQSNNKYAASSYLSLTPEQWKSH | |
| | Light Chain | SYELTQPPSVSVSPGQTASITCSGDKLGDKYACWYQQKPGQSPVLVIY | 2537 |
| | Variable | QDSKRPSGIPERFSGSNSGNTATLTISGTQAMDEADYYCQAWDSSTN | |
| | Region | VVFGGGTKLTVL | |
| | LCDR1 | SGDKLGDKYAC | 2538 |
| | LCDR2 | QDSKRPS | 2539 |
| | LCDR3 | QAWDSSTNVV | 2540 |
| | LFRW1 | SYELTQPPSVSVSPGQTASITC | 2541 |
| | LFRW2 | WYQQKPGQSPVLVIY | 2542 |
| | LFRW3 | GIPERFSGSNSGNTATLTISGTQAMDEADYYC | 2543 |
| | LFRW4 | FGGGTKLTVL | 2544 |
| S376-1070 | Heavy Chain | QVQLVESGGGVVQPGRSLRLSCAASGFTFSSYGMHWVRQAPGKGLE | 2545 |
| (Spike) | | WVAVIWYDGSNKYYADSVKGRFTISRDNSKNTLYLQMNSLRAEDTA | |
| | | VYYCARMRPEYSSGFDPWGQGTLVTVSSGSASAPTLFPLVSCENSPSD | |
| | | TSSV | |
| | Heavy Chain | QVQLVESGGGVVQPGRSLRLSCAASGFTFSSYGMHWVRQAPGKGLE | 2546 |
| | Variable | WVAVIWYDGSNKYYADSVKGRFTISRDNSKNTLYLQMNSLRAEDTA | |
| | Region | VYYCARMRPEYSSGFDPWGQGTLVTVSS | |
| | HCDR1 | SYGMH | 2547 |
| | HCDR2 | VIWYDGSNKYYADSVKG | 2548 |
| | HCDR3 | MRPEYSSGFDP | 2549 |
| | HFRW1 | QVQLVESGGGVVQPGRSLRLSCAASGFTFS | 2550 |
| | HFRW2 | WVRQAPGKGLEWVA | 2551 |
| | HFRW3 | RFTISRDNSKNTLYLQMNSLRAEDTAVYYCAR | 2552 |
| | HFRW4 | WGQGTLVTVSS | 2553 |
| | Light Chain | QSALTQPRSVSGSPGQSVTISCTGSSSDVGRYNYVSWYQQHPGKAPK | 2554 |
| | | LMTYDVTRRPSGVPARFSGSKSDNTASLTISGLQAEDEADYYCCSFA | |
| | | GSYTVFGGGTKLTVLGQPKAAPSVTLFPPSSEELQANKATLVCLISDF | |
| | | YPGAVTVAWKADGSPVKVGVETTKPSKQSNNKYAASSYLSLTPEQW | |
| | | KS~ | |
| | Light Chain | QSALTQPRSVSGSPGQSVTISCTGSSSDVGRYNYVSWYQQHPGKAPK | 2555 |
| | Variable | LMTYDVTRRPSGVPARFSGSKSDNTASLTISGLQAEDEADYYCCSFA | |
| | Region | GSYTVFGGGTKLTVL | |
| | LCDR1 | TGSSSDVGRYNYVS | 2556 |
| | LCDR2 | DVTRRPS | 2557 |
| | LCDR3 | CSFAGSYTV | 2558 |
| | LFRW1 | QSALTQPRSVSGSPGQSVTISC | 2559 |
| | LFRW2 | WYQQHPGKAPKLMTY | 2560 |
| | LFRW3 | GVPARFSGSKSDNTASLTISGLQAEDEADYYC | 2561 |
| | LFRW4 | FGGGTKLTVL | 2562 |
| S376-1721 | Heavy Chain | QVQLVQSGTEVREPGASVKVSCKASGYTFTGYYVHWVRQAPGQGLE | 2563 |
| (Spike) | | WMGWVNPGSGDTLYAQKFQGRFTLTRDMSITTAYMELSSLRSDDSA | |
| | | VYFCFRGYSYATFDYWGQGTLVTVSSASPTSPKVFPLSLCSTQPDGN | |
| | | VVIACLVQGFFPQEPLSVTWSESGQGVTARNF~ | |
| | Heavy Chain | QVQLVQSGTEVREPGASVKVSCKASGYTFTGYYVHWVRQAPGQGLE | 2564 |
| | Variable | WMGWVNPGSGDTLYAQKFQGRFTLTRDMSITTAYMELSSLRSDDSA | |
| | Region | VYFCFRGYSYATFDYWGQGTLVTVSS | |
| | HCDR1 | GYYVH | 2565 |
| | HCDR2 | WVNPGSGDTLYAQKFQG | 2566 |
| | HCDR3 | GYSYATFDY | 2567 |
| | HFRW1 | QVQLVQSGTEVREPGASVKVSCKASGYTFT | 2568 |
| | HFRW2 | WVRQAPGQGLEWMG | 2569 |
| | HFRW3 | RFTLTRDMSITTAYMELSSLRSDDSAVYFCFR | 2570 |
| | HFRW4 | WGQGTLVTVSS | 2571 |
| | Light Chain | QSVLTQPPSVSGAPGQRVTISCTGSSSNIGAGYDVHWYQQLPGTAPKL | 2572 |
| | | LIYGNSNRPSGVPDRFSGSKSGTSASLAITGLQAEDEADYYCQSYDSS | |
| | | LSGSFYVFGTGTKVTVLGQPKANPTVTLFPPSSEELQANKATLVCLIS | |
| | | DFYPGAVTVAWKADSSPVKAGVETTTPSKQSNNKYAASS~ | |
| | Light Chain | QSVLTQPPSVSGAPGQRVTISCTGSSSNIGAGYDVHWYQQLPGTAPKL | 2573 |
| | Variable | LIYGNSNRPSGVPDRFSGSKSGTSASLAITGLQAEDEADYYCQSYDSS | |
| | Region | LSGSFYVFGTGTKVTVL | |
| | LCDR1 | TGSSSNIGAGYDVH | 2574 |
| | LCDR2 | GNSNRPS | 2575 |
| | LCDR3 | QSYDSSLSGSFYV | 2576 |
| | LFRW1 | QSVLTQPPSVSGAPGQRVTISC | 2577 |
| | LFRW2 | WYQQLPGTAPKLLIY | 2578 |
| | LFRW3 | GVPDRFSGSKSGTSASLAITGLQAEDEADYYC | 2579 |
| | LFRW4 | FGTGTKVTVL | 2580 |
| S376-2486 | Heavy Chain | QVQLVESGGGVVQPGRSLRLSCAVSGFTFSSYAMHWVRQAPGKGLE | 2581 |
| (Spike) | | WVAVISYDGSNKYFADSVKGRFTISRDNSKNTLYLQMNSLRAEDTAV | |
| | | YYCARGRGNYFTYFDYWGQGTLVTVSSASTKGPSVFPLAPSSKSTSG | |
| | | GTAALGCLVKDYFPEPVTVSWNSGALTSGVHTFPAVLQSS~ | |
| | Heavy Chain | QVQLVESGGGVVQPGRSLRLSCAVSGFTFSSYAMHWVRQAPGKGLE | 2582 |
| | Variable | WVAVISYDGSNKYFADSVKGRFTISRDNSKNTLYLQMNSLRAEDTAV | |
| | Region | YYCARGRGNYFTYFDYWGQGTLVTVSS | |
| | HCDR1 | SYAMH | 2583 |
| | HCDR2 | VISYDGSNKYFADSVKG | 2584 |
| | HCDR3 | GRGNYFTYFDY | 2585 |
| | HFRW1 | QVQLVESGGGVVQPGRSLRLSCAVSGFTFS | 2586 |
| | HFRW2 | WVRQAPGKGLEWVA | 2587 |
| | HFRW3 | RFTISRDNSKNTLYLQMNSLRAEDTAVYYCAR | 2588 |
| | HFRW4 | WGQGTLVTVSS | 2589 |
| | Light Chain | EIVLTQSPGTLSLSPGERATLSCRASQSVSRNYLAWYQQKPGQAPRLL | 2590 |
| | | IYSASSRATGIPDRFSGSGSGTDFTLTISRLEPEDFAVYYCQQYGGSLTF | |
| | | GGGTKVEIKRTVAAPSVFIFPPSDEQLKSGTASVVCLLNNFYPREAKV | |
| | | QWKVDN~ | |
| | Light Chain | EIVLTQSPGTLSLSPGERATLSCRASQSVSRNYLAWYQQKPGQAPRLL | 2591 |
| | Variable | IYSASSRATGIPDRFSGSGSGTDFTLTISRLEPEDFAVYYCQQYGGSLTF | |
| | Region | GGGTKVEIK | |
| | LCDR1 | RASQSVSRNYLA | 2592 |
| | LCDR2 | SASSRAT | 2593 |
| | LCDR3 | QQYGGSLT | 2594 |
| | LFRW1 | EIVLTQSPGTLSLSPGERATLSC | 2595 |
| | LFRW2 | WYQQKPGQAPRLLIY | 2596 |
| | LFRW3 | GIPDRFSGSGSGTDFTLTISRLEPEDFAVYYC | 2597 |
| | LFRW4 | FGGGTKVEIK | 2598 |
| S376-780 | Heavy Chain | QVQLVESGGGVVQPGRSLRLSCAASGFTFSSYGMHWVRQAPGKGLE | 2599 |
| (Spike) | | WVAVISYDGSNKYYADSVKGRFTISRDNSKNTLYLQMNSLRAEDTA | |
| | | VYYCAKEGGSYSYYYYGMDVWGQGTTVTVSSGSASAPTLFPLVSCE | |
| | | NSPSDTSSV | |
| | Heavy Chain | QVQLVESGGGVVQPGRSLRLSCAASGFTFSSYGMHWVRQAPGKGLE | 2600 |
| | Variable | WVAVISYDGSNKYYADSVKGRFTISRDNSKNTLYLQMNSLRAEDTA | |
| | Region | VYYCAKEGGSYSYYYYGMDVWGQGTTVTVSS | |
| | HCDR1 | SYGMH | 2601 |
| | HCDR2 | VISYDGSNKYYADSVKG | 2602 |
| | HCDR3 | EGGSYSYYYYGMDV | 2603 |
| | HFRW1 | QVQLVESGGGVVQPGRSLRLSCAASGFTFS | 2604 |
| | HFRW2 | WVRQAPGKGLEWVA | 2605 |
| | HFRW3 | RFTISRDNSKNTLYLQMNSLRAEDTAVYYCAK | 2606 |
| | HFRW4 | WGQGTTVTVSS | 2607 |
| | Light Chain | DIQMTQSPSSLSASVGDRVTITCRASQGISNYLAWYQQKPGKVPKLLI | 2608 |
| | | YAASTLQSGVPSRFSGSGSGTDFTLTISSLQPEDVATYYCQKYNSAPR | |
| | | TFGPGTKVDIKRTVAAPSVFIFPPSDEQLKSGTASVVCLLNNFYPREAK | |
| | | VQWKVDN~ | |
| | Light Chain | DIQMTQSPSSLSASVGDRVTITCRASQGISNYLAWYQQKPGKVPKLLI | 2609 |
| | Variable | YAASTLQSGVPSRFSGSGSGTDFTLTISSLQPEDVATYYCQKYNSAPR | |
| | Region | TFGPGTKVDIK | |
| | LCDR1 | RASQGISNYLA | 2610 |
| | LCDR2 | AASTLQS | 2611 |
| | LCDR3 | QKYNSAPRT | 2612 |
| | LFRW1 | DIQMTQSPSSLSASVGDRVTITC | 2613 |
| | LFRW2 | WYQQKPGKVPKLLIY | 2614 |
| | LFRW3 | GVPSRFSGSGSGTDFTLTISSLQPEDVATYYC | 2615 |
| | LFRW4 | FGPGTKVDIK | 2616 |
| S469-373 | Heavy Chain | EVQLVESGGGLVQPGGSLRLSCVVSGFTFSRYWMSWVRQTPGKGLQ | 2617 |
| (NP) | | WVANIKQDDTNKFYEDSVKGRFTTSRDNAKNSLYLQMNSLRAEDTA | |
| | | VYYCARGGGSSSGLYFESWGQGTLVIVSSGSASAPTLFPLVSCENSPS | |
| | | DTSSV | |
| | Heavy Chain | EVQLVESGGGLVQPGGSLRLSCVVSGFTFSRYWMSWVRQTPGKGLQ | 2618 |
| | Variable | WVANIKQDDTNKFYEDSVKGRFTTSRDNAKNSLYLQMNSLRAEDTA | |
| | Region | VYYCARGGGSSSGLYFESWGQGTLVIVSS | |
| | HCDR1 | RYWMS | 2619 |
| | HCDR2 | NIKQDDTNKFYEDSVKG | 2620 |
| | HCDR3 | GGGSSSGLYFES | 2621 |
| | HFRW1 | EVQLVESGGGLVQPGGSLRLSCVVSGFTFS | 2622 |
| | HFRW2 | WVRQTPGKGLQWVA | 2623 |
| | HFRW3 | RFTTSRDNAKNSLYLQMNSLRAEDTAVYYCAR | 2624 |
| | HFRW4 | WGQGTLVIVSS | 2625 |
| | Light Chain | EVQLVESGGGLVQPGGSLRLSCVVSGFTFSRYWMSWVRQTPGKGLQ | 2626 |
| | | WVANIKQDDTNKFYEDSVKGRFTTSRDNAKNSLYLQMNSLRAEDTA | |
| | | VYYCARGGGSSSGLYFESWGQGTLVIVSSGSASAPTLFPLVSCENSPS | |
| | | DTSSV | |
| | Light Chain | EVQLVESGGGLVQPGGSLRLSCVVSGFTFSRYWMSWVRQTPGKGLQ | 2627 |
| | Variable | WVANIKQDDTNKFYEDSVKGRFTTSRDNAKNSLYLQMNSLRAEDTA | |
| | Region | VYYCARGGGSSSGLYFESWGQGTLVIVSS | |
| | LCDR1 | RYWMS | 2628 |
| | LCDR2 | NIKQDDTNKFYEDSVKG | 2629 |
| | LCDR3 | GGGSSSGLYFES | 2630 |
| | LFRW1 | EVQLVESGGGLVQPGGSLRLSCVVSGFTFS | 2631 |
| | LFRW2 | WVRQTPGKGLQWVA | 2632 |
| | LFRW3 | RFTTSRDNAKNSLYLQMNSLRAEDTAVYYCAR | 2633 |
| | LFRW4 | WGQGTLVIVSS | 2634 |
| S48-144 | Heavy Chain | EVQLVESGGDLVQPGRSLRLSCTASAFNFGDYAMSWVRQAPGKGLE | 2635 |
| (Spike) | | WVGFIRSKGYGGTTEYAASVKGRFTISRDDSNRIAYLQMNSLKSEDT | |
| | | AVYYCSRGYQLPNLWGQGTLVTVSSASPTSPKVFPLSLCSTQPDGNV | |
| | | VIACLVQGFFPQEPLSVTWSESGQGVTARNF~ | |
| | Heavy Chain | EVQLVESGGDLVQPGRSLRLSCTASAFNFGDYAMSWVRQAPGKGLE | 2636 |
| | Variable | WVGFIRSKGYGGTTEYAASVKGRFTISRDDSNRIAYLQMNSLKSEDT | |
| | Region | AVYYCSRGYQLPNLWGQGTLVTVSS | |
| | HCDR1 | DYAMS | 2637 |
| | HCDR2 | FIRSKGYGGTTEYAASVKG | 2638 |
| | HCDR3 | GYQLPNL | 2639 |
| | HFRW1 | EVQLVESGGDLVQPGRSLRLSCTASAFNFG | 2640 |
| | HFRW2 | WVRQAPGKGLEWVG | 2641 |
| | HFRW3 | RFTISRDDSNRIAYLQMNSLKSEDTAVYYCSR | 2642 |
| | HFRW4 | WGQGTLVTVSS | 2643 |
| | Light Chain | DIQMTQSPSSLSASVGDRVTITCRASQSISTFLNWYQQKPGKAPSLLIY | 2644 |
| | | AASSLQSGVPSRFSGSESGTDFTLTISSLQPEDFATYYCQQSYSTPLTFG | |
| | | GGTKVEIKRTVAAPSVFIFPPSDEQLKSGTASVVCLLNNFYPREAKVQ | |
| | | WKVDN~ | |
| | Light Chain | DIQMTQSPSSLSASVGDRVTITCRASQSISTFLNWYQQKPGKAPSLLIY | 2645 |
| | Variable | AASSLQSGVPSRFSGSESGTDFTLTISSLQPEDFATYYCQQSYSTPLTFG | |
| | Region | GGTKVEIK | |
| | LCDR1 | RASQSISTFLN | 2646 |
| | LCDR2 | AASSLQS | 2647 |
| | LCDR3 | QQSYSTPLT | 2648 |
| | LFRW1 | DIQMTQSPSSLSASVGDRVTITC | 2649 |
| | LFRW2 | WYQQKPGKAPSLLIY | 2650 |
| | LFRW3 | GVPSRFSGSESGTDFTLTISSLQPEDFATYYC | 2651 |
| | LFRW4 | FGGGTKVEIK | 2652 |
| S564-128 | Heavy Chain | EVHLVESGGGWVQPGGSLRLSCAASGFTLSTYWMSWVRQTPGEGLQ | 2653 |
| (NP) | | WVANIKQDGSSKYYVDSVKGRFTISRDNAKNSVYLQMNSLRGEDTA | |
| | | VYYCARGDGSNSGIYFDSWGQGTLVTVSSASTKGPSVFPLAPCSRSTS | |
| | | ESTAALGCLVKDYFPEPVTVSWNSGALTSGVHTFPAVLQSSG | |
| | Heavy Chain | EVHLVESGGGWVQPGGSLRLSCAASGFTLSTYWMSWVRQTPGEGLQ | 2654 |
| | Variable | WVANIKQDGSSKYYVDSVKGRFTISRDNAKNSVYLQMNSLRGEDTA | |
| | Region | VYYCARGDGSNSGIYFDSWGQGTLVTVSS | |
| | HCDR1 | TYWMS | 2655 |
| | HCDR2 | NIKQDGSSKYYVDSVKG | 2656 |
| | HCDR3 | GDGSNSGIYFDS | 2657 |
| | HFRW1 | EVHLVESGGGWVQPGGSLRLSCAASGFTLS | 2658 |
| | HFRW2 | WVRQTPGEGLQWVA | 2659 |
| | HFRW3 | RFTISRDNAKNSVYLQMNSLRGEDTAVYYCAR | 2660 |
| | HFRW4 | WGQGTLVTVSS | 2661 |
| | Light Chain | EIVMTQSPATLSVSPGERATLSCRASQSISSKLAWYQQKPGQAPRLLIY | 2662 |
| | | GASTRATGIPARFSGSGSGTEFTLTISSMQSEDFAVYYCQQYNYWYTF | |
| | | GQGTKLEIKRTVAAPSVFIFPPSDEQLKSGTASVVCLLNNFYPREAKV | |
| | | QWKVDNALQSGNSQESVTEQDSKDSTYSLSSTLTLSKADYE~ | |
| | Light Chain | EIVMTQSPATLSVSPGERATLSCRASQSISSKLAWYQQKPGQAPRLLIY | 2663 |
| | Variable | GASTRATGIPARFSGSGSGTEFTLTISSMQSEDFAVYYCQQYNYWYTF | |
| | Region | GQGTKLEIK | |
| | LCDR1 | RASQSISSKLA | 2664 |
| | LCDR2 | GASTRAT | 2665 |
| | LCDR3 | QQYNYWYT | 2666 |
| | LFRW1 | EIVMTQSPATLSVSPGERATLSC | 2667 |
| | LFRW2 | WYQQKPGQAPRLLIY | 2668 |
| | LFRW3 | GIPARFSGSGSGTEFTLTISSMQSEDFAVYYC | 2669 |
| | LFRW4 | FGQGTKLEIK | 2670 |
| S92-110 | Heavy Chain | EVQLVESGGGLVQPGGSLRLSCAASGFTFSSYEMNWVRQAPGKGLE | 2671 |
| (NP) | | WVSYISSSGSTIYYADSVKGRFTISRDNAKNSLYLQMNSLRAEDTAVY | |
| | | YCARDRRGDYGRYYYGMDVWGQGTTVTVSSGSASAPTLFPLVSCEN | |
| | | SPSDTSSV | |
| | Heavy Chain | EVQLVESGGGLVQPGGSLRLSCAASGFTFSSYEMNWVRQAPGKGLE | 2672 |
| | Variable | WVSYISSSGSTIYYADSVKGRFTISRDNAKNSLYLQMNSLRAEDTAVY | |
| | Region | YCARDRRGDYGRYYYGMDVWGQGTTVTVSS | |
| | HCDR1 | SYEMN | 2673 |
| | HCDR2 | YISSSGSTIYYADSVKG | 2674 |
| | HCDR3 | DRRGDYGRYYYGMDV | 2675 |
| | HFRW1 | EVQLVESGGGLVQPGGSLRLSCAASGFTFS | 2676 |
| | HFRW2 | WVRQAPGKGLEWVS | 2677 |
| | HFRW3 | RFTISRDNAKNSLYLQMNSLRAEDTAVYYCAR | 2678 |
| | HFRW4 | WGQGTTVTVSS | 2679 |
| | Light Chain | SSELTQDPAVSVALGQTVRITCQGDSLRSYYASWYQQKPGQAPVLVI | 2680 |
| | | YGKNNRPSGIPDRFSGSSSGNTASLTITGAQAEDEADYYCNSRDSSGN | |
| | | RVFGGGTKLTVLGQPKAAPSVTLFPPSSEELQANKATLVCLISDFYPG | |
| | | AVTVAWKADSSPVKAGVETTTPSKQSNNKYAASS~ | |
| | Light Chain | SSELTQDPAVSVALGQTVRITCQGDSLRSYYASWYQQKPGQAPVLVI | 2681 |
| | Variable | YGKNNRPSGIPDRFSGSSSGNTASLTITGAQAEDEADYYCNSRDSSGN | |
| | Region | RVFGGGTKLTVL | |
| | LCDR1 | QGDSLRSYYAS | 2682 |
| | LCDR2 | GKNNRPS | 2683 |
| | LCDR3 | NSRDSSGNRV | 2684 |
| | LFRW1 | SSELTQDPAVSVALGQTVRITC | 2685 |
| | LFRW2 | WYQQKPGQAPVLVIY | 2686 |
| | LFRW3 | GIPDRFSGSSSGNTASLTITGAQAEDEADYYC | 2687 |
| | LFRW4 | FGGGTKLTVL | 2688 |
| S92-2329 | Heavy Chain | EVQLVESGGGLVKPGGSLRLSCAASGFTFSSYSMNWVRQAPGKGLE | 2689 |
| (Spike) | | WVSSISSSGTYIYYADSVKGRFTISRDNAKNSLYLQMNSLRVEDTAVY | |
| | | YCAQSIAARLDWFDPWGQGTLVTVSSGSASAPTLFPLVSCENSPSDTS | |
| | | SV | |
| | Heavy Chain | EVQLVESGGGLVKPGGSLRLSCAASGFTFSSYSMNWVRQAPGKGLE | 2690 |
| | Variable | WVSSISSSGTYIYYADSVKGRFTISRDNAKNSLYLQMNSLRVEDTAVY | |
| | Region | YCAQSIAARLDWFDPWGQGTLVTVSS | |
| | HCDR1 | SYSMN | 2691 |
| | HCDR2 | SISSSGTYIYYADSVKG | 2692 |
| | HCDR3 | SIAARLDWFDP | 2693 |
| | HFRW1 | EVQLVESGGGLVKPGGSLRLSCAASGFTFS | 2694 |
| | HFRW2 | WVRQAPGKGLEWVS | 2695 |
| | HFRW3 | RFTISRDNAKNSLYLQMNSLRVEDTAVYYCAQ | 2696 |
| | HFRW4 | WGQGTLVTVSS | 2697 |
| | Light Chain | EIVLTQSPATLSLSPGERATLSCRASQSVSSYLAWYQQKPGQAPRLLIY | 2698 |
| | | DAFNRATGIPARFSGSGSGTDFTLTISSLEPEDFAVYYCQQRSNWPRTF | |
| | | GGGTKVEIKRTVAAPSVFIFPPSDEQLKSGTASVVCLLNNFYPREAKV | |
| | | QWKVDN~ | |
| | Light Chain | EIVLTQSPATLSLSPGERATLSCRASQSVSSYLAWYQQKPGQAPRLLIY | 2699 |
| | Variable | DAFNRATGIPARFSGSGSGTDFTLTISSLEPEDFAVYYCQQRSNWPRTF | |
| | Region | GGGTKVEIK | |
| | LCDR1 | RASQSVSSYLA | 2700 |
| | LCDR2 | DAFNRAT | 2701 |
| | LCDR3 | QQRSNWPRT | 2702 |
| | LFRW1 | EIVLTQSPATLSLSPGERATLSC | 2703 |
| | LFRW2 | WYQQKPGQAPRLLIY | 2704 |
| | LFRW3 | GIPARFSGSGSGTDFTLTISSLEPEDFAVYYC | 2705 |
| | LFRW4 | FGGGTKVEIK | 2706 |

TABLE 2
Nucleic Acid Sequences

| | | SEQ | | SEQ |
|---|---|---|---|---|
| | | ID | | ID |
| Clone | HC Sequence | NO: | LC Sequence | NO: |
| S20-15 | CAGGTGCAGCTGCAGGAGTCGGGCC | 1621 | TCCTATGTGCTGACTCAGCCACCCT | 1711 |
| | CAGGACTGGTGAGGCCTTCGGAGAC | | CGGTGTCAGTGGCCCCAGGACAGA | |
| | CCTGTCCCTCACCTGCACTGTCTCTG | | CGGCCAGGATTACCTGTGGGGGAA | |
| | GTGGCTCCATCAGTAGTCACTACTG | | ACAACATTGGAAGTAAAAGTGTGC | |
| | GAGCTGGATCCGGCAGCCCCCCGGG | | ACTGGTACCAGCAGAAGCCAGGCC | |
| | AAGGGACTGGAGTGGATTGGGTATA | | AGGCCCCTGTGCTGGTCGTCTATGA | |
| | TCTATTATAGTGGGAGCACCAATTA | | TGATAGCGACCGGCCCTCAGGGAT | |
| | CAACCCCTCCCTCAAGAGTCGAGTC | | CCCTGAGCGATTCTCTGGCTCCAAC | |
| | ACCATATCAGTAGACACGTCCAAGA | | TCTGGGAACACGGCCACCCTGACC | |
| | ACCAGTTCTCCCTGAAACTTATCTCT | | ATCAGCAGGGTCGAAGCCGGGGAT | |
| | GTGACCGCTGCGGACACGGCCGTGT | | GAGGCCGACTATTACTGTCAGGTG | |
| | ATTACTGTGCGAGAGCCGGGGGCGT | | TGGGATAGTAGTAGTGAGCATTAT | |
| | TTTTGGAGTGGTTCTGGACTTTGACC | | GTCTTCGGAACTGGGACCAAGGTC | |
| | ACTGGGGCCGGGGAACCCTGGTCAC | | ACCGTCCTAGGTCAGCCCAAGGCC | |
| | CGTCTCCTCAGCCTCCACCAAGGGC | | AACCCCACTGTCACTCTGTTCCCGC | |
| | CCATCGGTCTTCCCCCTGGCACCCTC | | CCTCCTCTGAGGAGCTCCAAGCCA | |
| | CTCCAAGAGCACCTCTGGGGGCACA | | ACAAGGCCACACTAGTGTGTCTGA | |
| | GCGGCCCTGGGCTGCCTGGTCAAGG | | TCAGTGACTTCTACCCGGGAGCTGT | |
| | ACTACTTCCCCGAACCGGTGACGGT | | GACAGTGGCCTGGAAGGCAGATGG | |
| | GTCGTGGAACTCAGGCGCCCTGACC | | CAGCCCCGTCAAGGCGGGAGTGGA | |
| | AGCGGCGTGCACACCTTCCCGGCTG | | GACCACCAAACCCTCCAAACAGAG | |
| | TCCTACAGTCCTCAGGA | | CAACAACAAGTACGCGGCCAGCAG | |
| | | | CTA | |
| S20-22 | CAGGTGCAGCTGCAGGAGTCGGGCC | 1622 | GACATCGTGATGACCCAGTCTCCA | 1712 |
| | CAGGACTGGTGAAGCCTTCGGAGAC | | GACTCCCTGGCTGTGTCTCTGGGCG | |
| | CCTGTCCCTCACCTGCACTGTCTCTG | | AGAGGGCCACCATCAACTGCAAGT | |
| | GTGGCTCCATCAGTAGTTTCTACTG | | CCAGCCAGACTGTTTTATACAGCTC | |
| | GGGCTGGATCCGGCAGCCCGCCGGG | | CAACAATAAGAACTACTTAGCTTG | |
| | AAGGGACTGGAGTGGATTGGGCGTT | | GTACCAGCAGAAACCAGGACAGCC | |
| | TCCATACTAGTGGGAGCACCAACTA | | TCCTAAGTTGCTCATTTACTGGGCA | |
| | CAACCCCTCCTTCAAGAGTCGAGTC | | TCTACCCGGGAATCCGGGGTCCCT | |
| | ACCATGTCAGTAGACACGTCCAAGA | | GACCGATTCAGTGGCAGCGGGTCT | |
| | ACCAGTTCTCCCTGAAGCTGACCTC | | GGGACAGATTTCACTCTCACCATC | |
| | TGTGACCGCCGCGGACACGGCCGTG | | AGCAGCCTGCAGGCTGGAGATGTG | |
| | TATTACTGTGCGAGCGGCCGGGGCA | | GCAGTTTATTACTGTCAGCAATATT | |
| | GCAGCTGGTACGTAGGCTGGTTCTT | | ATAATACTCCGGACACTTTCGGCG | |
| | CGATCTCTGGGGCCGTGGCACCCTG | | GAGGGACCAAGGTGGAGATCAATC | |
| | GTCACTGTCTCCTCAGCCTCCACCA | | GAACTGTGGCTGCACCATCTGTCTT | |
| | AGGGCCCATCGGTCTTCCCCCTGGC | | CATCTTCCCGCCATCTGATGAGCAG | |
| | ACCCTCCTCCAAGAGCACCTCTGGG | | TTGAAATCTGGAACTGCCTCTGTTG | |
| | GGCACAGCAGCCCTGGGCTGCCTGG | | TGTGCCTGCTGAATAACTTCTATCC | |
| | TCAAGGACTACTTCCCCGAACCGGT | | CAGAGAGGCCAAAGTACAGTGGAA | |
| | GACGGTGTCGTGGAACTCAGGCGCC | | GGTGGATAACGC | |
| | CTGACCAGCGGCGTGCACACCTTCC | | | |
| | CGGCTGTCCTACAGTCCTCAGGA | | | |
| S20-31 | CAGGTCCAACTCATACAGTCAGGGG | 1623 | GAAATTGTGTTGACGCAGTCCCCA | 1713 |
| | CTGAGGTGAAGAAGCCTGGGGCCTC | | GGCACCCTGTCTTTGTCTCCAGGGG | |
| | AGTGAAGGTCTCCTGCACGGCCTCC | | AAAGAGCCACCCTCTCCTGCAGGG | |
| | GGATACTCCCTCAATGAGTTGCCCA | | CCAGTCAGGATATTACCAACAACT | |
| | TACAGTGGGTGCGGCAGGCTCCTGG | | TCTTAGCCTGGTACCAGCAGAAAG | |
| | TAAAGGGCTTGAGTGGATGGGAGA | | CCGGCCAGGCTCCCAAACTCTTCAT | |
| | ATTTGATCCCGAAGATGGTGAAACA | | CTATGGTGCATCCAGGAGGGCCCC | |
| | ATCTACGCAGAGAAATTCCAGGGCA | | TGGCATCCCACACAGGTTCAGTGG | |
| | GAGTCACCCTGACCGAGGAAACATC | | CAGTGGGTCTGGGACAGACTTCAC | |
| | TACAAACACAGCCTACATGGAGTTG | | TCTCACCATCAGCAGCCTGGAGCC | |
| | AGCAGCCTGAAATCTGAGGACACG | | TGAAGATTTTGCAGTATATTACTGT | |
| | GCCGCGTATTTTTGTTCAACCGGCTC | | CAGCAGTACGGTCCCTCTCCGACG | |
| | GACTATTGGCGTCGTCATTTATGCTT | | TTCGGCCAAGGGACCAAGGTGGAA | |
| | TTGCTATCTGGGGCCAAGGGACAAT | | ATCAAACGAACTGTGGCTGCACCA | |
| | GGTCACCGTCTCTTCAGCTTCCACC | | TCTGTCTTCATCTTCCCGCCATCTG | |
| | AAGGGCCCATCGGTCTTCCCCCTGG | | ATGAGCAGTTGAAATCTGGAACTG | |
| | CGCCCTGCTCCAGGAGCACCTCCGA | | CCTCTGTTGTGTGCCTGCTGAATAA | |
| | GAGCACAGCCGCCCTGGGCTGCCTG | | CTTCTATCCCAGAGAGGCCAAAGT | |
| | GTCAAGGACTACTTCCCCGAACCGG | | ACAGTGGAAGGTGGATAACGCCCT | |
| | TGACGGTGTCGTGGAACTCAGGCGC | | CCAATCGGGTAACTCCCAGGAGAG | |
| | CCTGACCAGCGGCGTGCACACCTTC | | TGTCACAGAGCAGGACAGCAAGGA | |
| | CCGGCTGTCCTACAGTCCTCAGGA | | CAGCACCTACAGCCTCAGCAGCAC | |
| | | | CCTGACGCTGAGCAAAGCAGACTA | |
| | | | CGAGAA | |
| S20-40 | CAGGTGCAGCTGCAGGAGTCGGGCC | 1624 | CAGTCTGCCCTGACTCAGCCTGCCT | 1714 |
| | CAGGACTGGTGAAGCCTTCGGAGAC | | CCGTGTCTGGGTCTCCTGGACAGTC | |
| | CCTGTCCCTCACCTGCACTGTCTCTG | | GATCACCATCTCCTGCACTGGAAC | |
| | GTGGCTCCATCAGTAGTTACTACTG | | CAGCAGTGACGTTGGTGGTTATAA | |
| | GAGCTGGATCCGGCAGCCCGCCGGG | | CTATGTCTCCTGGTACCAACAGCAC | |
| | AAGGGACTGGAGTGGATTGGGCGT | | CCAGGCAAAGCCCCCAAACTCATG | |
| | ATCTATACCAGTGGGAGCACCAACT | | ATTTATGATGTCAGTAATCGGCCCT | |
| | ACAACCCCTCCCTCAAGAGTCGAGT | | CAGGGGTTTCTAATCGCTTCTCTGG | |
| | CACCATGTCAGTAGACACGTCCAAG | | CTCCAAGTCTGGCAACACGGCCTC | |
| | AACCAGTTCTCCCTGAAGCTGAGCT | | CCTGACCATCTCTGGGCTCCAGGCT | |
| | CTGTGACCGCCGCGGACACGGCCGT | | GAGGACGAGGCTGATTATTACTGC | |
| | GTATTACTGTGCGAGAGGGGGCAGT | | AGCTCATATACAAGCAGCAGCACT | |
| | GGCTGGCGCTTTGACTACTGGGGCC | | CTCGGAGTGTTCGGCGGAGGGACC | |
| | AGGGAACCCTGGTCACCGTCTCCTC | | AAGCTGACCGTCCTAGGTCAGCCC | |
| | AGGGAGTGCATCCGCCCCAACCCTT | | AAGGCTGCCCCCTCGGTCACTCTGT | |
| | TTCCCCCTCGTCTCCTGTGAGAATTC | | TCCCACCCTCCTCTGAGGAGCTTCA | |
| | CCCGTCGGATACGAGCAGCGTG | | AGCCAACAAGGCCACACTGGTGTG | |
| | | | TCTCATAAGTGACTTCTACCCGGGA | |
| | | | GCCGTGACAGTGGCCTGGAAGGCA | |
| | | | GATAGCAGCCCCGTCAAGGCGGGA | |
| | | | GTGGAGACCACCACACCCTCCAAA | |
| | | | CAAAGCAACAACAAGTACGCGGCC | |
| | | | AGCAGCTA | |
| S20-58 | CAGGTGCAGCTGCAGGAGTCGGGCC | 1625 | GATATTGTGATGACCCAGACTCCA | 1715 |
| | CAGGACTGGTGAAGCCTTCACAGAC | | CTCTCCTCACCTGTCACCCTTGGAC | |
| | CCTGTCCCTCACCTGCACTGTCTCTG | | AGCCGGCCTCCATCTCCTGCAGGTC | |
| | GTGGCTCCATCAACAGTGGTGATTA | | TAGTCAAAGCCTCGTACACAGTGA | |
| | CTACTGGAGCTGGATCCGCCAGCCC | | TGGAGACACCTACTTGAGTTGGCTT | |
| | CCAGGGAAGGGCCTGGAGTGGATT | | CAGCAGAGGCCAGGCCAGCCTCCA | |
| | GGGTACATCTATTTCAGTGGGAGCA | | AGACTCCTAATTTACAAGATTTCTA | |
| | CCTACTACAACCCGTCCCTCAAGAG | | ACCGGTTCTCTGGGGTCCCAGACA | |
| | TCGAGTTACCATATCACTAGACAGG | | GATTCAGTGGCAGTGGGGCAGGGA | |
| | TCCAAGAACCAGTTCTCCCTGAAGC | | CAGATTTCACACTGAAAATCAGCA | |
| | TGAGCTCTGTGACTGCCGCAGACAC | | GGGTGGAAGCTGAGGATGTCGGGG | |
| | GGCCGTGTATTACTGTGCCAGAGAG | | TTTATTACTGCATGCAAGCTACACA | |
| | GAAAGTATGATTACGCTTGGGGGAG | | ATTTCCTCTCACTTTCGGCGGAGGG | |
| | TTATCGTCGACTGGGGCCAGGGAAC | | ACCAAGGTGGAGATCAAACGAACT | |
| | CCTGGTCACCGTCTCCTCAGCCTCC | | GTGGCTGCACCATCTGTCTTCATCT | |
| | ACCAAGGGCCCATCGGTCTTCCCCC | | TCCCGCCATCTGATGAGCAGTTGA | |
| | TGGCACCCTCCTCCAAGAGCACCTC | | AATCTGGAACTGCCTCTGTTGTGTG | |
| | TGGGGGCACAGCAGCCCTGGGCTGC | | CCTGCTGAATAACTTCTATCCCAGA | |
| | CTGGTCAAGGACTACTTCCCCGAAC | | GAGGCCAAAGTACAGTGGAAGGTG | |
| | CGGTGACGGTGTCGTGGAACTCAGG | | GATAACGCCCTCCAATCGGGTAAC | |
| | CGCCCTGACCAGCGGCGTGCACACC | | TCCCAGGAGAGTGTCACAGAGCAG | |
| | TTCCCGGCTGTCCTACAGTCCTCAG | | GACAGCAAGGACAGCACCTACAGC | |
| | GA | | CTCAGCAGCACCCTGACGCTGAGC | |
| | | | AAAGCAGACTACGAGAA | |
| S20-74 | CAGGTGCAGCTGCAGGAGTCGGGCC | 1626 | CAGTCTGCCCTGACTCAGCCTCCCT | 1716 |
| | CAGGACTGGTGAAGCCTTCGGAGAC | | CCGCGTCCGGGTCTCCTGGACAGT | |
| | CCTGTCCCTCACCTGCACTGTCTCTG | | CAGTCACCATCTCCTGCACTGGAA | |
| | GTGGCTCCATCAGTAGTCACTACTG | | CCAGCAGTGACGTTGGTGGTTATA | |
| | GAGCTGGATCCGGCAGCCCCCAGGG | | ACTATGTCTCCTGGTACCAACAGC | |
| | AAGGGACTGGAGCAGATTGGGTAT | | ACCCAGGCAAAGCCCCCAAACTCA | |
| | ATGTATTACAGTGGGAGCACCAACT | | TGATTTATGAGGTCAGTAAGCGGC | |
| | ACAACCCCTCCCTCAAGAGTCGAGT | | CCTCAGGGGTCCCTGATCGCTACTC | |
| | CATCATATCAGTAGACACGTCCAAG | | TGGCTCCAAGTCTGGCAACACGGC | |
| | AACCAGTTCTCCCTGAAGTTGAGCT | | CTCCCTGACCGTCTCTGGGCTCCAG | |
| | CTGTGACCGCTGCGGACACGGCCGT | | GCTGAGGATGAGGCTGATTATTAC | |
| | GTATTACTGTGCGGGTCGTGACCAG | | TGCAGCTCATATGCAGGCAGCAGC | |
| | CTGTTATACGGGGCCGATGGTTTTG | | AATCATGTGATATTCGGCGGAGGG | |
| | ATATCTGGGGCCAAGGGACAATGGT | | ACCAAGCTGACCGTCCTAGGTCAG | |
| | CACCGTCTCTTCAGCCTCCACCAAG | | CCCAAGGCTGCCCCCTCGGTCACTC | |
| | GGCCCATCGGTCTTCCCCCTGGCAC | | TGTTCCCGCCCTCCTCTGAGGAGCT | |
| | CCTCCTCCAAGAGCACCTCTGGGGG | | TCAAGCCAACAAGGCCACACTGGT | |
| | CACAGCGGCCCTGGGCTGCCTGGTC | | GTGTCTCATAAGTGACTTCTACCCG | |
| | AAGGACTACTTCCCCGAACCGGTGA | | GGAGCCGTGACAGTGGCCTGGAAG | |
| | CGGTGTCGTGGAACTCAGGCGCCCT | | GCAGATAGCAGCCCCGTCAAGGCG | |
| | GACCAGCGGCGTGCACACCTTCCCG | | GGAGTGGAGACCACCACACCCTCC | |
| | GCTGTCCTACAGTCCTCAGGA | | AAACAAAGCAACAACAAGTACGCG | |
| | | | GCCAGCAGCTA | |
| S20-86 | GAAGTGCAGCTGGTGGAGTCTGGGG | 1627 | CAGTCTGCCCTGACTCAGCCTGCCT | 1717 |
| | GAGGCTTGGTACAGCCTGGCAGGTC | | CCGTGTCTGGGTCTCCTGGACAGTC | |
| | CCTGAGACTCTCCTGTGCAGCCTCT | | GATCACCATCTCCTGCACTGGAAC | |
| | GGATTCACCTTTGGTGACTATGCCA | | CAGCAGTGACGTTGGTGGTTATAA | |
| | TGTACTGGGTCCGGCAACCTCCAGG | | CTATGTCTCCTGGTACCAACAACAC | |
| | GAAGGGCCTGGAGTGGGTCTCAGGT | | CCAGGCAAAGCCCCCAAACTCATG | |
| | ATTAGTTGGAATAGAGGTACTATAG | | ATTTATGATGTCAGTAATCGGCCCT | |
| | GCTATGCGGACTCTGTGAAGGGCCG | | CAGGGGTTTCTAATCGCTTCTCTGG | |
| | ATTCACCATCTCCAGAGACAACGCC | | CTCCAAGTCTGGCAACACGGCCTC | |
| | AAGAACTCCCTGTATCTGCAAATGA | | CCTGACCATCTCTGGGCTCCAGGCT | |
| | ACAGTCTGACACCTGAGGACACGGC | | GAGGACGAGGCTGATTATTACTGC | |
| | CTTGTATTACTGTGCAAAAGATATG | | AGCTCATATACAAGCAGCAGCACT | |
| | CTACCAGCTAGTAGGTTCTTCTACT | | CTCGGCGTCTTCGGAACTGGGACC | |
| | ACATGGACGTCTGGGGCAAAGGGA | | AAGGTCACCGTCCTAGGTCAGCCC | |
| | CCACGGTCATCGTCTCCTCAGCCTC | | AAGGCCAACCCCACTGTCACTCTG | |
| | CACCAAGGGCCCATCGGTCTTCCCC | | TTCCCGCCCTCCTCTGAGGAGCTCC | |
| | CTGGCACCCTCCTCCAAGAGCACCT | | AAGCCAACAAGGCCACACTAGTGT | |
| | CTGGGGGCACAGCAGCCCTGGGCTG | | GTCTGATCAGTGACTTCTACCCGGG | |
| | CCTGGTCAAGGACTACTTCCCCGAA | | AGCTGTGACAGTGGCCTGGAAGGC | |
| | CCGGTGACGGTGTCGTGGAACTCAG | | AGATGGCAGCCCCGTCAAGGCGGG | |
| | GCGCCCTGACCAGCGGCGTGCACAC | | AGTGGAGACCACCAAACCCTCCAA | |
| | CTTCCCGGCTGTCCTACAGTCCTCA | | ACAGAGCAACAACAAGTACGCGGC | |
| | GGA | | CAGCAGCTA | |
| S24-68 | CAGGTGCAGCTGCAGGAGTCGGGCC | 1628 | CAGTCTGTGCTGACTCAGCCACCCT | 1718 |
| | CAGGACTGGTGAAGCCTTCGGAGAC | | CAGCGTCTGGGACCCCCGGGCAGA | |
| | CCTGTCCCTCACCTGCACTGTCTCTG | | GGGTCACCATCTCTTGTTCTGGAAG | |
| | GTGGCTCCATCACTAGTTACTACTG | | CAGCTCCAACATCGGAGGTAATCC | |
| | GAGCTGGATCCGGCAGCCCCCAGGG | | TGTAAACTGGTACCAGCAGCTCCC | |
| | AAGGGACTGGAGTGGATTGAATATA | | AGGAACGGCCCCCAAACTCCTCAT | |
| | TCCATTACAGTGGGAGCACCAACTA | | CTATAGTAATAATCAGCGGCCCTC | |
| | CAACCCCTCCCTCAAGAGTCGAGTC | | AGGGGTCCCTGACCGATTCTCTGG | |
| | ACCATATCAGTAGACACGTCCAAGA | | CTCCAAGTCTGGCACCTCAGCCTCC | |
| | ACCAGTTCTCCCTGAAGCTGAGCTC | | CTGGCCATCAGTGGGCTCCAGTCT | |
| | TGTGACCGCTGCGGACACGGCCGTG | | GAGGATGAGGCTGATTATTACTGT | |
| | TATTACTGTGCGAGATTGCTCAAGT | | GCAGCATGGGATGACAGCCTGAAG | |
| | ATAGCAGGGGGGGGTGCTACTTTGA | | GGTCCGGTATTCGGCGGAGGGACC | |
| | CCACTGGGGCCAGGGAACCCTGGTC | | AAGCTGACCGTCCTAGGTCAGCCC | |
| | ACCGTCTCCTCAGCCTCCACCAAGG | | AAGGCTGCCCCCTCGGTCACTCTGT | |
| | GCCCATCGGTCTTCCCCCTGGCACC | | TCCCGCCCTCCTCTGAGGAGCTTCA | |
| | CTCCTCCAAGAGCACCTCTGGGGGC | | AGCCAACAAGGCCACACTGGTGTG | |
| | ACAGCGGCCCTGGGCTGCCTGGTCA | | TCTCATAAGTGACTTCTACCCGGGA | |
| | AGGACTACTTCCCCGAACCGGTGAC | | GCCGTGACAGTGGCCTGGAAGGCA | |
| | GGTGTCGTGGAACTCAGGCGCCCTG | | GATAGCAGCCCCGTCAAGGCGGGA | |
| | ACCAGCGGCGTGCACACCTTCCCGG | | GTGGAGACCACCACACCCTCCAAA | |
| | CTGTCCTACAGTCCTCAGGA | | CAAAGCAACAACAAGTACGCGGCC | |
| | | | AGCAGCTACCTGAGCCTGACGCCT | |
| | | | GAGCAGTGGAAGTCCCACA | |
| S24-105 | GAGGTGCAGCTGGTGGAGTCTGGGG | 1629 | GAAATTGTGTTGACGCAGTCTCCA | 1719 |
| | GAGGCTTGGTACAGCCGGGGGGGTC | | GGCACCCTGTCTTTGTCTCCAGGGG | |
| | CCTGAGACTCTCCTGTGCAGCCTCT | | AAAGAGCCACCCTCTCCTGCAGGG | |
| | GGATTCACCCTCAGCAGCTATAGCA | | CCAGTCAGAGTGTTAGCAGCGGTT | |
| | TGAACTGGGTCCGCCAGGCTCCAGG | | ACTTAGCCTGGTACCAGCAAAAAC | |
| | GAAGGGGCTGGAGTGGGTTTCATAC | | CTGGCCAGGCTCCCAGGCTCCTCAT | |
| | ATTAGTAGTAGTAGTAGCACCATAT | | CTTTGGTGCATCCAGCAGGGCCAC | |
| | ACTACGCAGACTCTGTGAAGGGCCG | | TGGCATCCCAGACAGGTTCAGTGG | |
| | ATTCACCATCTCCAAAGACAACGCC | | CAGTGGGTCTGGGACAGACTTCAC | |
| | AAGAACTCACTGTATCTGCAAATGA | | TCTCACCATCAACAGACTGGAGCC | |
| | ACAGCCTGAGAGCCGAGGACACGG | | TGAAGATTTTGCAGTGTATTACTGT | |
| | CTGTCTATTACTGTGCGGTCGGACG | | CAGCAGTATGGTAGCTCACGGACG | |
| | GGGATACTTTGTCTACTGGGGCCAG | | TTCGGCCAAGGGACCAAGGTGGAA | |
| | GGAACCCTGGTCACCGTCTCCTCAG | | ATCAAACGAACTGTGGCTGCACCA | |
| | CCTCCACCAAGGGCCCATCGGTCTT | | TCTGTCTTCATCTTCCCGCCATCTG | |
| | CCCCCTGGCACCCTCCTCCAAGAGC | | ATGAGCAGTTGAAATCTGGAACTG | |
| | ACCTCTGGGGGCACAGCGGCCCTGG | | CCTCTGTTGTGTGCCTGCTGAATAA | |
| | GCTGCCTGGTCAAGGACTACTTCCC | | CTTCTATCCCAGAGAGGCCAAAGT | |
| | CGAACCGGTGACGGTGTCGTGGAAC | | ACAGTGGAAGGTGGATAACGCCCT | |
| | TCAGGCGCCCTGACCAGCGGCGTGC | | CCAATCGGGTAACTCCCAGGAGAG | |
| | ACACCTTCCCGGCTGTCCTACAGTC | | TGTCACAGAGCAGGACAGCAAGGA | |
| | CTCAGGA | | CAGCACCTACAGCCTCAGCAGCAC | |
| | | | CCTGACGCTGAGCAAAGCAGACTA | |
| | | | CGAGA | |
| S24-178 | CAGGTGCAGCTGGTGGAGTCTGGGG | 1630 | CAGTCTGCCCTGACTCAGCCTGCCT | 1720 |
| | GAGGCGTGGTCCAGCCTGGGAGGTC | | CCGTGTCTGGGTCTCCTGGACAGTC | |
| | CCTGAGACTCTCCTGTGCAGCCTCT | | GATCACCATCTCCTGCACTGGAAC | |
| | GGATTCACCTTCAGTAGCTATGGCA | | CACCAGTGACGTTGGTGGTTATGA | |
| | TGCACTGGGTCCGCCAGGCTCCAGG | | CTATGTCTCCTGGTACCAACAGCAC | |
| | CAAGGGGCTGGAGTGGGTGGCAGTT | | CCAGGCAAAGCCCCCAAACTCATA | |
| | ATATGGTATGATGGAAGTAATAAAT | | CTTTCTGAGGTCAGTAATCGGCCCT | |
| | ATTATGCAGACTCCGTGAAGGGCCG | | CAGGGGTTTCTAATCGCTTCTCTGG | |
| | ATTCACCATCTCCAGAGACAATTCC | | CTCCAAGTCTGGCAACACGGCCTC | |
| | AAGAACACGCTGTATCTGCAAATGA | | CCTGACCATCTCTGGGCTCCAGGCT | |
| | ACAGCCTGAGAGCCGAGGACACGG | | GAGGACGAGGCTGATTATTACTGC | |
| | CTGTGTATTACTGTGCGAGAATCGA | | AGCTCATATCCAAGCAGCAGCACT | |
| | GGGATACAGCTATGGCGACGTGAG | | CTAGTCTTCGGAACTGGGACCAAG | |
| | GGTCTACTACTACTACGGTATGGAC | | GTCACCGTCTTAGGTCAGCCCAAG | |
| | GTCTGGGGCCAAGGGACCACGGTCA | | GCCAACCCCACTGTCACTCTGTTCC | |
| | CCGTCTCCTCAGCCTCCACCAAGGG | | CGCCCTCCTCTGAGGAGCTCCAAG | |
| | CCCATCGGTCTTCCCCCTGGCACCCT | | CCAACAAGGCCACACTAGTGTGTC | |
| | CCTCCAAGAGCACCTCTGGGGGCAC | | TGATCAGTGACTTCTACCCGGGAG | |
| | AGCGGCCCTGGGCTGCCTGGTCAAG | | CTGTGACAGTGGCCTGGAAGGCAG | |
| | GACTACTTCCCCGAACCGGTGACGG | | ATGGCAGCCCCGTCAAGGCGGGAG | |
| | TGTCGTGGAACTCAGGCGCCCTGAC | | TGGAGACCACCACACCCTCCAAAC | |
| | CAGCGGCGTGCACACCTTCCCGGCT | | AAAGCAACAACAAGTACGCGGCCA | |
| | GTCCTACAGTCCTCAGGA | | GCAGCTA | |
| S24-188 | CAGGTCCACCTGGTGCAGTCTGGGG | 1631 | CAGTCTGCCCTGACTCAGCCTGCCT | 1721 |
| | CTGAGGTGAAGAAGCCTGGGTCCTC | | CCGTGTCTGGGTCTCCTGGACAGTC | |
| | GGTGAAGGTCTCCTGCAAGGCTTCT | | GATCACCATCTCCTGCACTGGAAC | |
| | GGAGGCACCTTCAGCAGCTGTGCTA | | CAGCAGTGACGTTGGTGGTTATAA | |
| | TCAGCTGGGTGCGACAGGCCCCTGG | | CTATGTCTCCTGGTACCAACAGCAC | |
| | ACAAGGGCTTGAGTGGATGGGAAG | | CCAGGCAAAGCCCCCAAACTCATG | |
| | GATCATCCCTATCCTTGGTATAGCA | | ATTTATGAGGTCACTAATCGGCCCT | |
| | AACTACGCACAGAAGTTCCAGGGCA | | CAGGGGTTTCTAATCGCTTCTCTGG | |
| | GAGTCACGATTACCGCGGACAAATC | | CTCCAGGTCTGGCAACACGGCCTC | |
| | CACGAGCACAGCCTACATGGAGCTG | | CCTGACCATCTCTGGGCTCCAGGCT | |
| | AGCAGCCTGAGATCTGAGGACACG | | GAGGACGAGGCTGATTATTACTGC | |
| | GCCGTGTATTACTGTGCGAGAGGAT | | AGCTCATATACAAGCAGCAGCCTT | |
| | GGGAGTTTGGTTCGGGGAGTTATTA | | TATGTCTTCGGAACTGGGACCAAG | |
| | TCGAACTGATTACTACTACTACGCT | | GTCGCCGTCCTAGGTCAGCCCAAG | |
| | ATGGACGTCTGGGGCCAAGGGACC | | GCCAACCCCACTGTCACTCTGTTCC | |
| | ACGGTCACCGTCTCCTCAGCCTCCA | | CGCCCTCCTCTGAGGAGCTTCAAG | |
| | CCAAGGGCCCATCGGTCTTCCCCCT | | CCAACAAGGCCACACTGGTGTGTC | |
| | GGCGCCCTGCTCCAGGAGCACCTCT | | TCATAAGTGACTTCTACCCGGGAG | |
| | GGGGGCACAGCGGCCCTGGGCTGCC | | CCGTGACAGTGGCCTGGAAGGCAG | |
| | TGGTCAAGGACTACTTCCCCGAACC | | ATAGCAGCCCCGTCAAGGCGGGAG | |
| | GGTGACGGTGTCGTGGAACTCAGGC | | TGGAGACCACCAAACCCTCCAAAC | |
| | GCCCTGACCAGCGGCGTGCACACCT | | AGAGCAACAACAAGTACGCGGCCA | |
| | TCCCGGCTGTCCTACAGTCCTCAGG | | GCAGCTA | |
| | A | | | |
| S24-202 | GAAGTGCAGCTGGTGCAGTCTGGAG | 1632 | GAAATTGTGTTGACACAGTCTCCA | 1722 |
| | CAGAGGTGAAAAAGCCCGGGGAGT | | GCCACCCTGTCTTTGTCTCCAGGGG | |
| | CTCTGAGGATCTCCTGTAAGGGTTC | | AAAGAGCCACCCTCTCCTGCAGGG | |
| | TGGATACAGCTTTAGCAGCTACTGG | | CCAGTCAGAGTGTTAGCAGCTACC | |
| | ATCAGCTGGGTGCGCCAGATGCCCG | | TAGCCTGGTACCAACAGAAACCTG | |
| | GGAAAGGCCTGGAGTGGATGGGGA | | GCCAGGCTCCCAGGCTCCTCATCTA | |
| | GGATTGATCCTAGTGACTCTAACAC | | TGATGCATCCAACAGGGCCTCTGG | |
| | CAACTACAGCCCGTCCTTCCAAGGC | | CATCCCAGCCAGGTTCAGTGGCAG | |
| | CACGTCACCATCTCAGCTGACAAGT | | TGGGTCAGGGACAGACTTCACTCT | |
| | CCATCAGCACTGCCTACCTGCAGTG | | CACCATCAGCAGCCTAGAGCCTGA | |
| | GAGCAGCCTGAAGGCCTCGGACACC | | AGATTTTGCAGTTTATTACTGTCAG | |
| | GCCATGTATTACTGTGCGAGACTCT | | CAACGTCGCAACTGGCCTCTCACTT | |
| | CCGTCCGGGTATGGTTCGGGGAGTT | | TCGGCGGAGGGACCAAGGTGGAGA | |
| | ACCCCATTACGGTATGGACGTCTGG | | CCAAACGAACTGTGGCTGCACCAT | |
| | GGCCAAGGGACCACGGTCACCGTCT | | CTGTCTTCATCTTCCCGCCATCTGA | |
| | CCTCAGCCTCCACCAAGGGCCCATC | | TGAGCAGTTGAAATCTGGAACTGC | |
| | GGTCTTCCCCCTGGCACCCTCCTCCA | | CTCTGTTGTGTGCCTGCTGAATAAC | |
| | AGAGCACCTCTGGGGGCACAGCGG | | TTCTATCCCAGAGAGGCCAAAGTA | |
| | CCCTGGGCTGCCTGGTCAAGGACTA | | CAGTGGAAGGTGGATAACGC | |
| | CTTCCCCGAACCGGTGACGGTGTCG | | | |
| | TGGAACTCAGGCGCCCTGACCAGCG | | | |
| | GCGTGCACACCTTCCCGGCTGTCCT | | | |
| | ACAGTCCTCAGGA | | | |
| S24-278 | CAGGTGCAGCTGGTGCAGTCTGGGG | 1633 | GAAATTGTGTTGACGCAGTCTCCA | 1723 |
| | CTGAGGTGAAGAAGCCTGGGGCCTC | | GGCACCCTGTCTTTGTCTCCAGGGG | |
| | AGTGAAGGTCTCCTGCAAGGCTTCT | | AAAGAGCCACCCTCTCCTGCAGGG | |
| | GGATACACCTTCACCGGCTACTATA | | CCAGTCAGAGTATTAGCAGCAGCT | |
| | TGCACTGGGTGCGACAGGCCCCTGG | | ACTTAGCCTGGTACCAGCAGAAAC | |
| | ACAAGGGCTTGAGTGGATGGGATG | | CTGGCCAGGCTCCCAGGCTCCTCAT | |
| | GATCAACCCTAACAGTGGTGACACA | | CTATGGTGCATCCAGCAGGGCCAC | |
| | AACTATGCACAGAAGTTTCAGGGCT | | TGGCATCCCAGACAGGTTCAGTGG | |
| | GGGTCACCATGACCAGGGACACGTC | | CAGTGGGTCTGGGACAGACTTCAC | |
| | CCTCAGCACAGCCTACATGGAGCTG | | TCTCACCATCAGCAGACTGGAGCC | |
| | AGCAGGCTGAAATCTGACGACACG | | TGAAGATTTTGCAGTGTATTACTGT | |
| | GCCGTGTATTACTGTGCGAGAGTAG | | CAGCAGTATGGTAGCTCACTCACTT | |
| | GGGTTGGTGAATATAGTGGGAGGCA | | TCGGCGGAGGGACCAAGGTGGAGA | |
| | CTACTACTACTACGGTATGGACGTC | | TCAAACGAACTGTGGCTGCACCAT | |
| | TGGGGCCAAGGGACCACGGTCACC | | CTGTCTTCATCTTCCCGCCATCTGA | |
| | GTCTCCTCAGCCTCCACCAAGGGCC | | TGAGCAGTTGAAATCTGGAACTGC | |
| | CATCGGTCTTCCCCCTGGCACCCTCC | | CTCTGTTGTGTGCCTGCTGAATAAC | |
| | TCCAAGAGCACCTCTGGGGGCACAG | | TTCTATCCCAGAGAGGCCAAAGTA | |
| | CGGCCCTGGGCTGCCTGGTCAAGGA | | CAGTGGAAGGTGGATAACGC | |
| | CTACTTCCCCGAACCGGTGACGGTG | | | |
| | TCGTGGAACTCAGGCGCCCTGACCA | | | |
| | GCGGCGTGCACACCTTCCCGGCTGT | | | |
| | CCTACAGTCCTCAGGA | | | |
| S24-339 | GAGGTGCAGCTGGTGGAGTCTGGGG | 1634 | GAAATAGTGATGACGCAGTCTCCA | 1724 |
| | GAGGCTTGGTACAGCCAGGGCGGTC | | GCCACCCTGTCTGTGTCTCCAGGGG | |
| | CCTGAGACTCTCCTGTACAGCTTCT | | AAAGAGCCACCCTCTCCTGCAGGG | |
| | GGATTCACCTTTGGTGATTATGCTAT | | CCAGTCAGAGTGTTAGCAGCAACT | |
| | GAGCTGGTTCCGCCAGGCTCCAGGG | | TAGCCTGGTACCAGCAGAAACCTG | |
| | AAGGGGCTGGAGTGGGTAGGTTTCA | | GCCAGGCTCCCAGGCTCCTCATCTA | |
| | TTAGAAGCAAAGCTTATGGTGGGAC | | TGGTGCATCCACCAGGGCCACTGG | |
| | AACACAACACGCCGCCTCTGTGAAA | | TATCCCAGCCAGGTTCAGTGGCAG | |
| | GGCAGATTCACCATCTCAAGAGATG | | TGGGTCTGGGACAGAGTTCACTCT | |
| | ATTCCAAAAGCATCGCCTATCTGCA | | CACCATCAGCAGCCTGCAGTCTGA | |
| | AATGAACAGCCTGAAAACCGAGGA | | AGATTTTGCAGTTTATTACTGTCAG | |
| | CACAGCCGTGTATCACTGTGCTAGA | | CAGTATGATAACTGGTGGACGTTC | |
| | GATGGATATGATTGTAGTGGTGGTA | | GGCCAAGGGACCAAGGTGGAAATC | |
| | GATGCTACTCCCATATATTTGACTA | | AAACGAACTGTGGCTGCACCATCT | |
| | CTGGGGCCAGGGAACCCTGGTCACC | | GTCTTCATCTTCCCGCCATCTGATG | |
| | GTCTCCTCAGGTGAGTCCTCACCAC | | AGCAGTTGAAATCTGGAACTGCCT | |
| | CCCCTCTCTGAGTCCACTTAGGGAG | | CTGTTGTGTGCCTGCTGAATAACTT | |
| | ACTCAGCTTGCCAGGGTCTCAGGGT | | CTATCCCAGAGAGGCCAAAGTACA | |
| | CAGAGTCTTGTAG | | GTGGAAGGTGGATAACGC | |
| S24-472 | CAGGTGCAGCTGCAGGAGTCGGGCC | 1635 | CAGCTTGTGCTGACTCAATCGCCCT | 1725 |
| | CAGGACTGGTGAAGCCTTCGGGGAC | | CTGCCTCTGCCTCCCTGGGAGCCTC | |
| | CCTGTCCCTCACCTGCGCTGTCTCTG | | GGTCAAGCTCACCTGCACTCTGAG | |
| | GTGGCTCCATCAGCAGTATTAACTG | | CAGTGGGCACAGCAGCTACACCAT | |
| | GTGGAGTTGGGTCCGCCAGCCCCCA | | CGCATGGCATCAGCAGCAGCCAGA | |
| | GGGAAGGGGCTGGAGTGGATCGGG | | GAAGGGCCCTCGGTACTTGATGAA | |
| | GAAATCTATCATAGTGGGAACACCA | | AGTTAACAGTGATGGCAGCCACAC | |
| | ACTATAACCCGTCCCTCAAGAGTCG | | CAAGGGGGACGGGATCCCTGATCG | |
| | AGTCACCATATCAGGAGACAAGTCC | | CTTCTCAGGCTCCAGCTCTGGGGCT | |
| | AAGAACCAGTTCTCCCTGAAGCTGA | | GAGCGCTACCTCACCATCTCCAGC | |
| | GCTCTGTGACCGCCGCGGACACGGC | | CTCCAGTCTGAGGATGAGGCTGAC | |
| | CGTGTATTACTGTGCGAGAGGTTAC | | TATTACTGTCAGACCTGGGGCACT | |
| | TATGATAGTAGTCCTTATTACGAGC | | GGCATTCGAGTATTCGGCGGAGGG | |
| | CACAGGGAATTGACTACTGGGGCCA | | ACCAAGCTGACCGTCCTAGGTCAG | |
| | GGGAATCCTGGTCACCGTCTCCTCA | | CCCAAGGCTGCCCCCTCGGTCACTC | |
| | GCCTCCACCAAGGGCCCATCGGTCT | | TGTTCCCGCCCTCCTCTGAGGAGCT | |
| | TCCCCCTGGCACCCTCCTCCAAGAG | | TCAAGCCAACAAGGCCACACTGGT | |
| | CACCTCTGGGGGCACAGCGGCCCTG | | GTGTCTCATAAGTGACTTCTACCCG | |
| | GGCTGCCTGGTCAAGGACTACTTCC | | GGAGCCGTGACAGTGGCCTGGAAG | |
| | CCGAACCGGTGACGGTGTCGTGGAA | | GCAGATAGCAGCCCCGTCAAGGCG | |
| | CTCAGGCGCCCTGACCAGCGGCGTG | | GGAGTGGAGACCACCACACCCTCC | |
| | CACACCTTCCCGGCTGTCCTACAGT | | AAACAAAGCAACAACAAGTACGCG | |
| | CCTCAGGA | | GCCAGCAGCTA | |
| S24-490 | CAGGTGCAGCTGGTGCAGTCTGGGG | 1636 | GAAATTGTGTTGACGCAGTCTCCA | 1726 |
| | CTGAGGTGAAGAAGCCTGGGGCCTC | | GGCACCCTGTCTTTGTCTCCAGGGG | |
| | AGTGAAGGTTTCCTGCAAGGCATCT | | AAAGAGCCACCCTCTCCTGCAGGG | |
| | GGATACACCTTCACCAGCTACTTTA | | CCAGTCAGAGTGTTACCAGCAGCT | |
| | TTCACTGGGTGCGACAGGCCCCTGG | | ACTTAGCCTGGTACCAGCAGAGAC | |
| | ACAAGGGCTTGAGTGGATGGGAAT | | GTGGCCAGGCTCCCAGGCTCCTCA | |
| | AATCAACCCTAGTGGTGGTAGCACA | | TCTATGGTGCATCCAGCAGGGCCA | |
| | AGCTACGCACAGAAGTTCCAGGGCA | | CTGGCATCCCAGACAGGTTCAGTG | |
| | GAGTCACCATGACCAGGGACACGTC | | GCAGTGGGTCTGGGACAGACTTCA | |
| | CACGAGCACAGTCTACATGGAGCTG | | CTCTCACCATCAGCAGACTGGAGC | |
| | AGCAGCCTGAGATCTGAGGACACG | | CTGAAGATTTTGCAGTGTATTACTG | |
| | GCCGTGTATTACTGTGCGAGACACA | | TCAGCAGTATGGTAGCTCACCTCTC | |
| | CAACCCCGACAAGATACTTTGACTA | | ACTTTCGGCGGAGGGACCAAGGTG | |
| | CTGGGGCCAGGGAACCCTGGTCACC | | GAGATCAAACGAACTGTGGCTGCA | |
| | GTCTCCTCAGGGAGTGCATCCGCCC | | CCATCTGTCTTCATCTTCCCGCCAT | |
| | CAACCCTTTTCCCCCTCGTCTCCTGT | | CTGATGAGCAGTTGAAATCTGGAA | |
| | GAGAATTCCCCGTCGGATACGAGCA | | CTGCCTCTGTTGTGTGCCTGCTGAA | |
| | GCGTG | | TAACTTCTATCCCAGAGAGGCCAA | |
| | | | AGTACAGTGGAAGGTGGATAACGC | |
| S24-494 | CAGCTGCAGCTGCAGGAGTCGGGCC | 1637 | GACATCCAGATGACCCAGTCTCCA | 1727 |
| | CAGGACTGGTGAAGCCTTCGGAGAC | | TCCTCCCTGTCTGCATCTGTAGGAG | |
| | CCTGTCCCTCACCTGCACTGTCTCTG | | ACAGAGTCACCATCACTTGCCGGG | |
| | GTGGCTCCATCAGCAGTAGTAGTTA | | CAAGTCAGAGCATTAGCAGCTATT | |
| | CTACTGGGGCTGGATCCGCCAGCCC | | TAAATTGGTATCAGCAGAAACCAG | |
| | CCAGGGAAGGGGCTGGAGTGGATT | | GGAAAGCCCCTAAGCTCCTGATCT | |
| | GGGAGTATCTATTATAGTGGGAGCA | | ATGCTGCATCCAGTTTGCAAAGTG | |
| | CCTACTACAACCCGTCCCTCAAGAG | | GGGTCCCATCAAGGTTCAGTGGCA | |
| | TCGAGTCACCATATCCGTAGACACG | | GTGGATCTGGGACAGATTTCACTCT | |
| | TCCAAGAACCAGTTCTCCCTGAAGC | | CACCATCAGCAGTCTGCAACCTGA | |
| | TGAGCTCTGTGACCGCCGCAGACAC | | AGATTTTGCAACTTACTACTGTCAA | |
| | GGCTGTGTATTACTGTGCGAGAAAG | | CAGAGTTACAGTACCCCTCAACTC | |
| | CCACGTAGTGACTACGGGTACTTCG | | ACTTTCGGCGGAGGGACCAAGGTG | |
| | ATCTCTGGGGCCGTGGCACCCTGGT | | GAGATCAAACGAACTGTGGCTGCA | |
| | CACTGTCTCCTCAGCCTCCACCAAG | | CCATCTGTCTTCATCTTCCCGCCAT | |
| | GGCCCATCGGTC | | CTGATGAGCAGTTGAAATCTGGAA | |
| | | | CTGCCTCTGTTGTGTGCCTGCTGAA | |
| | | | TAACTTCTATCCCAGAGAGGCCAA | |
| | | | AGTACAGTGGAAGGTGGATAACGC | |
| S24-566 | GAGGTGCAGCTGGTGGAGTCTGGGG | 1638 | GATATTGTGATGACTCAGTCTCCAC | 1728 |
| | GAGGCTTGGTAAAGCCAGGGCGGTC | | TCTCCCTGCCCGTCACCCCTGGAGA | |
| | CCTGAGACTCTCCTGTACAGCTTCT | | GCCGGCCTCCATCTCCTGCAGGTCT | |
| | GGATTCACCTTTGGTGATTATGCTAT | | AGTCAGAGCCTCCTGCATAGTAAT | |
| | GAGCTGGTTCCGCCAGGCTCCAGGG | | GGATACAACTATTTGGATTGGTAC | |
| | AAGGGGCTGGAGTGGGTAGGTTTCA | | CTGCAGAAGCCAGGGCAGTCTCCA | |
| | CTAGAAGGAAAGCTTATGGTGGGAC | | CAGCTCCTGATCTATTTGGGTTCTA | |
| | AACAGAGTACGCCGCGTCTGTGAAA | | ATCGGGCCTCCGGGGTCCCTGACA | |
| | GGCAGATTCACCATCTCAAGAGATG | | GGTTCAGTGGCAGTGGATCAGGCA | |
| | ATTCCAAAAGCATCGCCTATCTGCA | | CAGATTTTACACTGAAAATCAGCA | |
| | AATGAACAGCCTGAAAACCGAGGA | | GAGTGGAGGCTGAGGATGTTGGGG | |
| | CACAGCCGTGTATTACTGTACTAGA | | TTTATTACTGCATGCAACCTCTACA | |
| | ATTAAGGTGGGCCGTTTCGATCTTA | | AACTCCTTGGACGTTCGGCCAAGG | |
| | CCGACAGTGGGAGCTACCGATACTT | | GACCAAGGTGGAAATCAAACGAAC | |
| | TGACTACTGGGGCCAGGGAACCCTG | | TGTGGCTGCACCATCTGTCTTCATC | |
| | GTCACCGTCTCCTCAGCCTCCACCA | | TTCCCGCCATCTGATGAGCAGTTGA | |
| | AGGGCCCATCGGTCTTCCCCCTGGC | | AATCTGGAACTGCCTCTGTTGTGTG | |
| | ACCCTCCTCCAAGAGCACCTCTGGG | | CCTGCTGAATAACTTCTATCCCAGA | |
| | GGCACAGCGGCCCTGGGCTGCCTGG | | GAGGCCAAAGTACAGTGGAAGGTG | |
| | TCAAGGACTACTTCCCCGAACCGGT | | GATAACGC | |
| | GACGGTGTCGTGGAACTCAGGCGCC | | | |
| | CTGACCAGCGGCGTGCACACCTTCC | | | |
| | CGGCTGTCCTACAGTCCTCAGGA | | | |
| S24-636 | GAGGTGCAGCTGGTGGAGTCTGGGG | 1639 | CAGACTGTGGTGACCCAGGAGCCA | 1729 |
| | GAGGCTTGGTCCAGCCTGGGGGGTC | | TCGTTCTCAGTGTCCCCTGGAGGGA | |
| | CCTGAGACTCTCCTGTGCAGCCTCT | | CAGTCACACTCACTTGTGGCTTGAG | |
| | GGATTCACCTTAAGTAGCTATTGGA | | CTCTGGCTCAGTCTCTACTAGTTAC | |
| | TGAGCTGGGTCCGCCAGGCTCCAGG | | TACCCCAGCTGGTACCAGCAGACC | |
| | GAAGGGGCTGGAGTGGGTGGCCAA | | CCAGGCCAGGCTCCACGCACGCTC | |
| | CATAAAGCAAGATGGAAGTGAGAA | | ATCTACAGCACAAACAAACGCTCT | |
| | ATACTATGTGGACTCTGTGAAGGGC | | TCTGGGGTCCCTGATCGCTTCTCTG | |
| | CGATTCACCATCTCCAGAGACAACG | | GCTCCATCCTTGGGAACAAAGCTG | |
| | CCAAGAACTCACTGTATCTGCAAAT | | CCCTCACCATCACGGGGGCCCAGG | |
| | GAACAGCCTGAGAGCCGAGGACAC | | CAGATGATGAATCTGATTATTACTG | |
| | GGCCGTGTATTACTGTGCGAGAGAT | | TGTGCTCTATATGGGTAGTGGCATG | |
| | CTAACTGCCACCTGGTTCGACCCCT | | TCGGTGTTCGGCGGAGGGACCAAG | |
| | GGGGCCAGGGAACCCTGGTCACCGT | | CTGACCGTCCTAGGTCAGCCCAAG | |
| | CTCCTCAGCACCCACCAAGGCTCCG | | GCTGCCCCCTCGGTCACTCTGTTCC | |
| | GATGTGTTCCCCATCATATCAGGGT | | CGCCCTCCTCTGAGGAGCTTCAAG | |
| | GCAGACACCCAAAGGATAACAGCC | | CCAACAAGGCCACACTGGTGTGTC | |
| | CTGTGGTCCTGGCATGCTTGATAAC | | TCATAAGTGACTTCTACCCGGGAG | |
| | TGGGTACCACC | | CCGTGACAGTGGCCTGGAAGGCAG | |
| | | | ATAGCAGCCCCGTCAAGGCGGGAG | |
| | | | TGGAGACCACCACACCCTCCAAAC | |
| | | | AAAGCAACAACAAGTACGCGGCCA | |
| | | | GCAGCTA | |
| S24-740 | CAGGTCCAGCTTGTGCAGTCTGGGG | 1640 | GACATCGTGATGACCCAGTCTCCA | 1730 |
| | CTGAGGTGAAGAAGCCTGGGGCCTC | | GACTCCCTGGCTGTGTCTCTGGGCG | |
| | AGTGAAGGTTTCCTGCAAGGCTTCT | | AGAGGGCCACCATCAACTGCAAGT | |
| | GGATACACCTTCACTAGCTATGCTT | | CCAGCCAGAGTGTTTTATACAGCTC | |
| | TGCATTGGGTGCGCCAGGCCCCCGG | | CAACAATAAGAACTACTTAGCCTG | |
| | ACAAAGGCTTGAGTGGATGGGATG | | GTACCAGCAGAAACCAGGACAGCC | |
| | GATCAACGCTGGCAATGGTAACACA | | TCCTAAGCTGCTCATTTACTGGGCA | |
| | AAATATTCACAGAGGTTCCAGGGCA | | TCTACCCGGGAATCCGGGGTCCCT | |
| | GAGTCACCATTATTAGGGACACATC | | GACCGATTCAGTGGCAGCGGGTCT | |
| | CGCGAGCACAACCTACATGGAGCTG | | GGGACAGATTTCACTCTCACCATC | |
| | AGCAGCCTGAGATCTGAAGACACG | | AGCAGCCTGCAGGCTGAAGATGTG | |
| | GCTGTGTATTACTGTGCGAGAGGCT | | GCAGTTTATTACTGTCAGCAATATT | |
| | ATGCCCGAGCCGGGGTTATTACTAT | | ATAGTACTCCTCCCCTCACTTTCGG | |
| | CAAAGAATCACTCCACCACTGGGGC | | CGGAGGGACCAAGGTGGAGATCAA | |
| | CAGGGCACCCTGGTCACCGTCTCCT | | ACGAACTGTGGCTGCACCATCTGT | |
| | CAGCCTCCACCAAGGGCCCATCGGT | | CTTCATCTTCCCGCCATCTGATGAG | |
| | CTTCCCCCTGGCACCCTCCTCCAAG | | CAGTTGAAATCTGGAACTGCCTCT | |
| | AGCACCTCTGGGGGCACAGCGGCCC | | GTTGTGTGCCTGCTGAATAACTTCT | |
| | TGGGCTGCCTGGTCAAGGACTACTT | | ATCCCAGAGAGGCCAAAGTACAGT | |
| | CCCCGAACCGGTGACGGTGTCGTGG | | GGAAGGTGGATAACGC | |
| | AACTCAGGCGCCCTGACCAGCGGCG | | | |
| | TGCACACCTTCCCGGCTGTCCTACA | | | |
| | GTCCTCAGGA | | | |
| S24-791 | CAGGTGCAGCTGCAGGAGTCGGGCC | 1641 | GAGATTGTGTTGACGCACTCTCCA | 1731 |
| | CAGGACTGGTGAAGCCTTCGGAGAC | | GGCACCCTGTCTTTGTCTCCAGGGG | |
| | CCTGTCCCTCACCTGCACTGTCTCTG | | AAAGAGCCACCCTCTCCTGCAGGG | |
| | GTGGCTCCATCAGTAGTTCCTACTG | | CCAGTCAGAGTGTCCGCAGCTACT | |
| | GAGCTGGATCCGGCAGCCCCCAGGG | | TAGCCTGGTACCAGCAGAAACCTG | |
| | AAGGGACTGGAGTGGATTGGGTATA | | GCCAGGCTCCCAGGCTCCTCATCTA | |
| | TCTATTACAGTGGGAACACCAACTA | | TGGTGCATCCAGCAGGGCCACTGG | |
| | CAACCCCTCCCTCAAGAGTCGAGTC | | CATCCCAGACAGGTTCAGTGGCAG | |
| | ACCCTATCAATAGACACGTCCAAGA | | TGGGTCTGGGACAGACTTCACTCTC | |
| | ACCAGTTCTCCCTGAAGCTGAGCTC | | ACCATCAGCAGACTGGAGCCTGAC | |
| | TGTGACCGCTGCGGACACGGCCGTG | | GATTTTGCAGTGTATTACTGTCAGC | |
| | TATTACTGTGCGTGCAGTGTTACGA | | AGTATGGTAGCTCACCTTGGACGTT | |
| | TTTTTGGAGTGGTTACCCCTGCTTTT | | CGGCCAAGGGACCAAGGTGGAAAT | |
| | GATATCTGGGGCCAAGGGACAATG | | CAAACGAACTGTGGCTGCACCATC | |
| | GTCACCGTCTCTTCAGCCTCCACCA | | TGTCTTCATCTTCCCGCCATCTGAT | |
| | AGGGCCCATCGGTCTTCCCCCTGGC | | GAGCAGTTGAAATCTGGAACTGCC | |
| | ACCCTCCTCCAAGAGCACCTCTGGG | | TCTGTTGTGTGCCTGCTGAATAACT | |
| | GGCACAGCGGCCCTGGGCTGCCTGG | | TCTATCCCAGAGAGGCCAAAGTAC | |
| | TCAAGGACTACTTCCCCGAACCGGT | | AGTGGAAGGTGGATAACGCCCTCC | |
| | GACGGTGTCGTGGAACTCAGGCGCC | | AATCGGGTAACTCCCAGGAGAGTG | |
| | CTGACCAGCGGCGTGCACACCTTCC | | TCACAGAGCAGGACAGCAAGGACA | |
| | CGGCTGTCCTACAGTCCTCAGGA | | GCACCTACAGCCTCAGCAGCACCC | |
| | | | TGACGCTGAGCAAAGCAGACTACG | |
| | | | AG | |
| S24-902 | CAGGTCCAGCTGGTGCAGTCTGGGG | 1642 | CAGGCTGTGGTGACTCAGGAGCCC | 1732 |
| | CTGAGGTGAAGAAGCCTGGGTCCTC | | TCACTGACTGTGTCCCCAGGAGGG | |
| | GGTGAAGGTCTCCTGCAAGGCTTCT | | ACAGTCACTCTCACCTGTGGCTCCA | |
| | GGAGGCACCTTCAGCAGCTATGCTA | | GCACTGGAGCTGTCACCAGTGGTC | |
| | TCAGCTGGGTGCGACAGGCCCCTGG | | ATTATCCCTACTGGTTCCAGCAGAA | |
| | ACAAGGGCTTGAGTGGATGGGAAG | | GCCTGGCCAAGCCCCCAGGACACT | |
| | GATCATCCCTATCCTTGGTATAGCA | | GATTTATGATACAAGCAACAAACA | |
| | AACTACGCACAGAAGTTCCAGGGCA | | CTCCTGGACACCTGCCCGGTTCTCA | |
| | GAGTCACGATTACCGCGGACAAATC | | GGCTCCCTCCTTGGGGGCAAAGCT | |
| | CACGAGCACAGCCTACATGGAGCTG | | GCCCTGACCCTTTCGGGTGCGCAG | |
| | AGCAGCCTGAGATCTGAGGACACG | | CCTGAGGATGAGGCTGAGTATTAC | |
| | GCCGTGTATTACTGTGCGAGATGGG | | TGCTTGCTCTCCTATAGTGGTTGGG | |
| | ATTTTGGAGTGGTTATTCAATACGG | | TGTTCGGCGGAGGGACCAAGCTGA | |
| | TATGGACGTCTGGGGCCAAGGGACC | | CCGTCCTAGGTCAGCCCAAGGCTG | |
| | ACGGTCACCGTCTCCTCAGCCTCCA | | CCCCCTCGGTCACTCTGTTCCCGCC | |
| | CCAAGGGCCCATCGGTCTTCCCCCT | | CTCCTCTGAGGAGCTTCAAGCCAA | |
| | GGCACCCTCCTCCAAGAGCACCTCT | | CAAGGCCACACTGGTGTGTCTCAT | |
| | GGGGGCACAGCGGCCCTGGGCTGCC | | AAGTGACTTCTACCCGGGAGCCGT | |
| | TGGTCAAGGACTACTTCCCCGAACC | | GACAGTGGCCTGGAAGGCAGATAG | |
| | GGTGACGGTGTCGTGGAACTCAGGC | | CAGCCCCGTCAAGGCGGGAGTGGA | |
| | GCCCTGACCAGCGGCGTGCACACCT | | GACCACCACACCCTCCAAACAAAG | |
| | TCCCGGCTGTCCTACAGTCCTCAGG | | CAACAACAAGTACGCGGCCAGCAG | |
| | ACTCTACTCCCTCAGCAGCGTGGTG | | CTA | |
| | ACCGTGCCCTCCAGCAGCTTGGG | | | |
| S24-921 | CAGGTGCAGCTGCAGGAGTCGGGCC | 1643 | GACATCCAGATGACCCAGTCTCCA | 1733 |
| | CAGGACTGGTGAAGCCTTCGGAGAC | | TCCTCCCTGTCTGCATCTCTGGGAG | |
| | CCTGTCCCTCACCTGCACTGTCTCTG | | ACGGGGTCACCATCACTTGCCGGG | |
| | GTGGCTCCATCAATAGTTTCTACTG | | CAAGTCAGAGCATTAGCAGCTATT | |
| | GAACTGGATCCGGCAGCCCCCCGGG | | TAAGTTGGTATCAGCAGAAACCCG | |
| | AAGGGACTGGAGTGGATTGGGTATA | | GGAAAGCCCCTAAGCTCCTGATCT | |
| | TCTATTACAGTGGGAACACCAAGTA | | ATGCTGCATCCAGTTTGCAAAGTG | |
| | CAACCCCTCCCTCAAGAGTCGAGTC | | GGGTCCCATCAAGGTTCAGTGGCA | |
| | ACCATATCAGTAGACACGTCCAACA | | GTGGATCTGGGACAGATTTCACTCT | |
| | GCCAGTTCTCCCTGAAGCTGAGCTC | | CACCATCAGCAGTCTGCAACCTGA | |
| | TGTGACCGCTGCGGACACGGCCGTG | | AGATTTTGCAACTTACTACTGTCAA | |
| | TATTACTGTGCGGCGCTCAAAAAGC | | CAGAGTTACAATACCCCCGTGACG | |
| | AGGAGCTGGTATCGTTGCAGGCTTT | | TTCGGCCAAGGGACCAAGGTGGAA | |
| | TGATATCTGGGGCCAAGGGACAATG | | ATCAAACGAACTGTGGCTGCACCA | |
| | GTCACCGTCTCTTCAGCCTCCACCA | | TCTGTCTTCATCTTCCCGCCATCTG | |
| | AGGGCCCATCGGTCTTCCCCCTGGC | | ATGAGCAGTTGAAATCTGGAACTG | |
| | ACCCTCCTCCAAGAGCACCTCTGGG | | CCTCTGTTGTGTGCCTGCTGAATAA | |
| | GGCACAGCGGCCCTGGGCTGCCTGG | | CTTCTATCCCAGAGAGGCCAAAGT | |
| | TCAAGGACTACTTCCCCGAACCGGT | | ACAGTGGAAGGTGGATAACGCAGA | |
| | GACGGTGTCGTGGAACTCAGGCGCC | | TCGGAAGAGC | |
| | CTGACCAGCGGCGTGCACACCTTCC | | | |
| | CGGCTGTCCTACAGTCCTCAGGA | | | |
| S24-1063 | CAGGTGCAGCTGCAGGAGTCGGGCC | 1644 | GAAATTGTGTTGACGCAGTCTCCA | 1734 |
| | CAGGACTGGTGAAGCCTTCGGAGAC | | GGCACCCTGTCTTTGTCTCCAGGGG | |
| | CCTGTCCCTCACCTGCACTGTCTCTG | | AAAGAGCCACCCTCTCCTGCAGGG | |
| | GTGGCTCCATCAGTAGTTACTACTG | | CCAGTCAGAGTGTTAGCAGCAGCT | |
| | GAGCTGGATCCGGCAGCCCCCAGGG | | ACTTAGCCTGGTACCAGCAGAAAC | |
| | AAGGGACTGGAGTGGATTGGATATA | | CTGGCCAGGCTCCCAGGCTCCTCAT | |
| | TCTATTACAGTGGGAGCACCAAGTA | | CTATGGTGCATCCAGCAGGGCCAC | |
| | CAACCCCTCCCTCAAGAGTCGAGTC | | TGACATCCCAGACAGGTTCAGTGG | |
| | ACCATATCAGTAGACACGTCCAAGA | | CAGTGGGTCTGGGACAGACTTCAC | |
| | ACCAGTTCTCCCTGAAGCTGACCTC | | TCTCACCATCAGCAGACTGGAGCC | |
| | TGTGACCGCTGCGGACACGGCCGTG | | TGAAGATTTTGCAGTGTATTACTGT | |
| | TATTACTGTGCGAGAATCTATGATA | | CAGCAGTATGGTAGCTCACCGTGG | |
| | GTAGTGGTTATTACCATCCCGTCTTT | | ACGTTCGGCCAAGGGACCAAGGTG | |
| | GACTACTGGGGCCAGGGAACCCTGG | | GAAATCAAACGAACTGTGGCTGCA | |
| | TCACCGTCTCCTCAGCCTCCACCAA | | CCATCTGTCTTCATCTTCCCGCCAT | |
| | GGGCCCATCGGTCTTCCCCCTGGCA | | CTGATGAGCAGTTGAAATCTGGAA | |
| | CCCTCCTCCAAGAGCACCTCTGGGG | | CTGCCTCTGTTGTGTGCCTGCTGAA | |
| | GCACAGCGGCCCTGGGCTGCCTGGT | | TAACTTCTATCCCAGAGAGGCCAA | |
| | CAAGGACTACTTCCCCGAACCGGTG | | AGTACAGTGGAAGGTGGATAACGC | |
| | ACGGTGTCGTGGAACTCAGGCGCCC | | | |
| | TGACCAGCGGCGTGCACACCTTCCC | | | |
| | GGCTGTCCTACAGTCCTCAGGA | | | |
| S24-1224 | CAGGTGCAGCTGGTGCAGTCTGGGG | 1645 | CAGTCTGTGCTGACGCAGCCGCCC | 1735 |
| | CTGAGGTGAAGAAGCCTGGGGCCTC | | TCAGTGTCTGGGGCCCCAGGGCAG | |
| | AGTGAGGGTTTCCTGCAAGGCATCT | | AGGGTCACCATCCCCTGCACTGGG | |
| | GGATACACCTTCACCAGCTACTATA | | AGCAGCTTCAACATCGGGGCAGGT | |
| | TCTACTGGGTGCGACAGGCCCCTGG | | TATGATGTACACTGGTACCAGCAG | |
| | ACAAGGGCTTGAGTGGATGGGAGT | | CTTCCAGGAACAGCCCCCAAACTC | |
| | AATCAACCCTAGTGGTGGTAGCACA | | CTCATCTTTGGTAACAGCAATCGGC | |
| | AGCTACGCACAGAAGTTCCAGGGCA | | CCTCAGGGGTCCCTGACCGATTCTC | |
| | GAGTCACCTTGACCAGGGACACGTC | | TGGCTCCAGGTCTGGCACCTCAGC | |
| | CACGAGCACAGTCTACATGGACCTG | | CTCCCTGGCCATCACTGGGCTCCAG | |
| | AGCAGTCTGAGATCTGAGGACACGG | | GCTGAGGATGAGGCTGATTATTAC | |
| | CCGTGTATTACTGTGCGAGAGATCC | | TGCCAGTCCTATGACAGTAGCCTG | |
| | TATAATGTGGGAGGTAGTAACTCGG | | AGTGGTGTGGTATTCGGCGGAGGG | |
| | GGGAGGGGCAACTGGTTCGACCCCT | | ACTACGCTGACCGTCCTAGGTCAG | |
| | GGGGCCAGGGAACCCTGGTCACCGT | | CCCAAGGCTGCCCCCTCGGTCACTC | |
| | CTCCTCAGCCTCCACCAAGGGCCCA | | TGTTCCCGCCCTCCTCTGAGGAGCT | |
| | TCGGTCTTCCCCCTGGCACCCTCCTC | | TCAAGCCAACAAGGCCACACTGGT | |
| | CAAGAGCACCTCTGGGGGCACAGC | | GTGTCTCATAAGTGACTTCTACCCG | |
| | GGCCCTGGGCTGCCTGGTCAAGGAC | | GGAGCCGTGACAGTGGCCTGGAAG | |
| | TACTTCCCCGAACCGGTGACGGTGT | | GCAGATAGCAGCCCCGTCAAGGCG | |
| | CGTGGAACTCAGGCGCCCTGACCAG | | GGAGTGGAGACCACCACACCCTCC | |
| | CGGCGTGCACACCTTCCCGGCTGTC | | AAACAAAGCAACAACAAGTACGCG | |
| | CTACAGTCCTCAGGA | | GCCAGCAGCTACCTGAGCCTGACG | |
| | | | CCTGAGCAGTGGAAGTCCCAC | |
| S24-1271 | GAGGTGCAGCTGGTGGAGTCTGGGG | 1646 | TCCTATGAGCTGACTCAGCCACCCT | 1736 |
| | GAGGCTTGGTCCAGCCTGGGGGGTC | | CAGTGTCCGTGTCCCCAGGACAGA | |
| | CCTGAGACTCTCCTGTGCAGCCTCT | | CAGCCAGCATCACCTGCTCTGGGG | |
| | GGATTCACCGTCAGTAGCAACTACA | | ATAAATTGGGGGATAGATATGTTT | |
| | TGAGCTGGGTCCGCCAGGCTCCAGG | | GTTGGTATCAGCAGAAGCCAGGTC | |
| | GAAGGGGCTGGAGTGGGTCTCAGTT | | AGTCCCCTGTGCTGGTCATCTATCA | |
| | ATTTATAGCGATGGTAACACATACT | | AGATACCAAGCGGCCCTCAGGGAT | |
| | ATGCAGACTCCGTGAAGGGCAGATT | | CCCTGAGCGATTCTCTGGCTCCAAC | |
| | CACCATCTCCAGAGACAATTCCAAG | | TCTGGGAACACAGCCACTCTGACC | |
| | AACATGTTATATCTTCAAATGAACA | | ATCAGCGGGACCCAGGCTATGGAT | |
| | GCCTGAGAGCCGAGGACACGGCTGT | | GAGGCTGACTATTACTGTCAGGCG | |
| | GTATTACTGTGCGAGAGACCCCGGC | | TGGGACAGCAGCACTTGGGTGTTC | |
| | CAGGGGTATTGTAGTGGTGGTAGCT | | GGCGGAGGGACCAAGCTGACCGTC | |
| | GCGCTCCGTCCTATTCTCTTGACTAC | | CTGGGTCAGCCCAAGGCTGCCCCC | |
| | TGGGGCCAGGGAACCCTGGTCACTG | | TCGGTCACTCTGTTCCCGCCCTCCT | |
| | TCTCCTCAGGGAGTGCATCCGCCCC | | CTGAGGAGCTTCAAGCCAACAAGG | |
| | AACCCTTTTCCCCCTCGTCTCCTGTG | | CCACACTGGTGTGTCTCATAAGTG | |
| | AGAATTCCCCGTCGGATACGAGCAG | | ACTTCTACCCGGGAGCCGTGACAG | |
| | CGTG | | TGGCCTGGAAGGCAGATAGCAGCC | |
| | | | CCGTCAAGGCGGGAGTGGAGACCA | |
| | | | CCACACCCTCCAAACAAAGCAACA | |
| | | | ACAAGTACGCGGCCAGCAGCTA | |
| S24-1339 | GAGGTGCAGCTGGTGGAGTCTGGAG | 1647 | GAAATTGTGTTGACGCAGTCTCCA | 1737 |
| | GAGGCTTGGTCCAGCCTGGGGGGTC | | GGCACCCTGTCTTTGTCTCCAGGGG | |
| | CCTGAGACTCTCCTGTGCAGCCTCT | | AAAGAGCCACCCTCTCCTGCAGGG | |
| | GGGTTCACCGTCAGTAGCAACTACA | | CCAGTCAGAGTGTTAGCAGCAGCT | |
| | TGAGCTGGGTCCGCCAGGCTCCAGG | | ACTTAGCCTGGTACCAGCAGAAAC | |
| | GAAGGGGCTGGAGTGGGTCTCAGAT | | CTGACCAGGCTCCCAGGCTCCTCAT | |
| | ATTTATAGCGGTGGTAGCACATACT | | CTATGGTGCATCCAGCAGGGCCAC | |
| | ACGCAGACTCCGTGAAGGGCCGATT | | TGGCATCCCAGACAGGTTCAGTGG | |
| | CACCATCTCCAGACACAATTCCAAG | | CAGTGGGTCTGGGACAGACTTCAC | |
| | AACACGCTGTATCTTCAAATGAACA | | TCTCACCATCAGCAGACTGGAGCC | |
| | GCCTGAGAGCTGAGGACACGGCCGT | | TGAAGATTTTGCAGTGTATTACTGT | |
| | GTATTACTGTGCGAGAGATCGACGG | | CAGCAGTATGGTAGCTCACCTAAC | |
| | GGATACAGCTATGGTTTGCACCACG | | ACTTTTGGCCAGGGGACCAAGCTG | |
| | GTATGGACGTCTGGGGCCAAGGGAC | | GAGATCAAACGAACTGTGGCTGCA | |
| | CACGGTCACCGTCTCCTCAGCCTCC | | CCATCTGTCTTCATCTTCCCGCCAT | |
| | ACCAAGGGCCCATCGGTCTTCCCCC | | CTGATGAGCAGTTGAAATCTGGAA | |
| | TGGCACCCTCCTCCAAGAGCACCTC | | CTGCCTCTGTTGTGTGCCTGCTGAA | |
| | TGGGGGCACAGCGGCCCTGGGCTGC | | TAACTTCTATCCCAGAGAGGCCAA | |
| | CTGGTCAAGGACTACTTCCCCGAAC | | AGTACAGTGGAAGGTGGATAACGC | |
| | CGGTGACGGTGTCGTGGAACTCAGG | | | |
| | CGCCCTGACCAGCGGCGTGCACACC | | | |
| | TTCCCGGCTGTCCTACAGTCCTCAG | | | |
| | GA | | | |
| S24-1345 | CAGCTGCAGCTGCAGGAGTCGGGCC | 1648 | GCCATCCAGTTGACCCAGTCTCCAT | 1738 |
| | CAGGACTGGTGAAGCCTTCGGAGAC | | CCTCCCTGTCTGCATCTGTAGGAGA | |
| | CCTGTCCCTCACCTGCACTGTCTCTG | | CAGAGTCACCATCACTTGCCGGGC | |
| | GTGGCTCCATCAGCAGTAGTAGTTA | | AAGTCAGGGCATTAGCAGTGCTTT | |
| | CTACTGGGGCTGGATCCGCCAGCCC | | AGCCTGGTATCAGCAGAAACCAGG | |
| | CCAGGGAAGGGGCTGGAGTGGATT | | GAAAGCTCCTAAGCTCCTGATCTAT | |
| | GGGAGTATCTATTATAGTGGGAGCA | | GATGCCTCCAGTTTGGAAAGTGGG | |
| | CCTACTACAACCCGTCCCTCAAGAG | | GTCCCATCAAGGTTCAGCGGCAGT | |
| | TCGAGTCACCATATCCGTAGACACG | | GGATCTGGGACAGATTTCACTCTC | |
| | TCCAAGAACCAGTTCTCCCTGAAGC | | ACCATCAGCAGCCTGCAGCCTGAA | |
| | TGAGCTCTGTGACCGCCGCAGACAC | | GATTTTGCAACTTATTACTGTCAAC | |
| | GGCTGTGTATTACTGTGCGAGACGA | | AGTTTAATAGTTACCTCACTTTCGG | |
| | ATCAGACGCCCCACCTCGGAAGTGG | | CGGAGGGACCAAGGTGGAGATCAA | |
| | TTATTACTTATGTCTTTGACTACTGG | | ACGAACTGTGGCTGCACCATCTGT | |
| | GGCCAGGGAACCCTGGTCACCGTCT | | CTTCATCTTCCCGCCATCTGATGAG | |
| | CCTCAGCACCCACCAAGGCTCCGGA | | CAGTTGAAATCTGGAACTGCCTCT | |
| | TGTGTTCCCCATCATATCAGGGTGC | | GTTGTGTGCCTGCTGAATAACTTCT | |
| | AGACACCCAAAGGATAACAGCCCT | | ATCCCAGAGAGGCCAAAGTACAGT | |
| | GTGGTCCTGGCATGCTTGATAACTG | | GGAAGGTGGATAACGCCCTCCAAT | |
| | GGTACCACC | | CGGGTAACTCCCAGGAGAGTGTCA | |
| | | | CAGAGCAGGACAGCAAGGACAGC | |
| | | | ACCTACAGCCTCAGC | |
| S24- | GAGGTGCAGCTGGTGGAGTCTGGAG | 1649 | CAGACTGTGGTGACCCAGGAGCCA | 1739 |
| 1378 | GAGGCTTGGTCCAGCCTGGGGGGTC | | TCGTTCTCAGTGTCCCCTGGAGGGA | |
| | CCTGAGACTCTCCTGTGCAGCCTCT | | CAGTCACACTCACTTGTGGCTTGAG | |
| | GGGTTCACCGTCAGTAGCAACTACA | | CTCTGGCTCAGTCTCTACTAGTTAC | |
| | TGAGCTGGGTCCGCCAGGCTCCAGG | | TACCCCAGCTGGTACCAGCAGACC | |
| | GAAGGGGCTGGAGTGGGTCTCAGTT | | CCAGGCCAGGCTCCACGCACGCTC | |
| | ATTTATAGCGGTGGTAGCACATACT | | ATCTACAGCACAAACACTCGCTCTT | |
| | ACGCAGACTCCGTGAAGGGCCGATT | | CTGGGGTCCCTGATCGCTTCTCTGG | |
| | CACCATCTCCAGACACAATTCCAAG | | CTCCATCCTTGGGAACAAAGCTGC | |
| | AACACGCTGTATCTTCAAATGAACA | | CCTCACCATCACGGGGGCCCAGGC | |
| | GCCTGAGAGCTGAGGACACGGCCGT | | AGATGATGAATCTGATTATTACTGT | |
| | GTATTACTGTGCGAGAGAAGGATAT | | GTGCTGTATATGGGTAGTGGCATTT | |
| | TGTACTAATGGTGTATGCTATAGGC | | CGGTGTTCGGCGGAGGGACCAAGC | |
| | ATGCTTTTGATATCTGGGGCCAAGG | | TGACCGTCCTAGGTCAGCCCAAGG | |
| | GACAATGGTCACCGTCTCTTCAGGG | | CTGCCCCCTCGGTCACTCTGTTCCC | |
| | AGTGCATCCGCCCCAACCCTTTTCC | | GCCCTCCTCTGAGGAGCTTCAAGC | |
| | CCCTCGTCTCCTGTGAGAATTCCCC | | CAACAAGGCCACACTGGTGTGTCT | |
| | GTCGGATACGAGCAGCGTG | | CATAAGTGACTTCTACCCGGGAGC | |
| | | | CGTGACAGTGGCCTGGAAGGCAGA | |
| | | | TAGCAGCCCCGTCAAGGCGGGAGT | |
| | | | GGAGACCACCACACCCTCCAAACA | |
| | | | AAGCAACAACAAGTACGCGGCCAG | |
| | | | CAGCTA | |
| S24-1379 | CAGGTGCAGCTGCAGGAGTCGGGCC | 1650 | CAGTCTGTGCTGACTCAGCCACCCT | 1740 |
| | CAGGACTGGTGAAGCCTTCGGAGAC | | CAGCGTCTGGGACCCCCGGGCAGA | |
| | CCTGTCCCTCACCTGCACTGTCTCTG | | GGGTCACCATCTCTTGTTCTGGAAG | |
| | GTGGCTCCATCAGTAGTTACTACTG | | CAGCTCCAACATCGGAAGTAATTA | |
| | GAGCTGGATCCGGCAGCCCCCAGGG | | TGTATACTGGTACCAGCAGCTCCC | |
| | AAGGGACTGGAGTGGATTGGGTATA | | AGGAACGGCCCCCAAACTCCTCAT | |
| | TCTATTACAGTGGGAGCACCAACTA | | CTATAGGAATAATCAGCGGCCCTC | |
| | CAACCCCTCCCTCAAGAGTCGAGTC | | AGGGGTCCCTGACCGATTCTCTGG | |
| | ACCATATCAGTAGACACGTCCAAGA | | CTCCAAGTCTGGCACCTCAGCCTCC | |
| | ACCAGTTCTCCCTGAAGCTGAGCTC | | CTGGCCATCAGTGGGCTCCGGTCC | |
| | TGTGACCGCTGCGGACACGGCCGTG | | GAGGATGAGGCTGATTATTACTGT | |
| | TATTACTGTGCGAGAGATTACTATC | | GCAGCATGGGATGACAGCCTGAGT | |
| | AACTCCCTATGGACGTCTGGGGCCA | | GGTCGGGTGTTCGGCGGAGGGACC | |
| | AGGGACCACGGTCACCGTCTCCTCA | | AAGCTGACCGTCCTAGGTCAGCCC | |
| | GCCTCCACCAAGGGCCCATCGGTCT | | AAGGCTGCCCCCTCGGTCACTCTGT | |
| | TCCCCCTGGCACCCTCCTCCAAGAG | | TCCCGCCCTCCTCTGAGGAGCTTCA | |
| | CACCTCTGGGGGCACAGCGGCCCTG | | AGCCAACAAGGCCACACTGGTGTG | |
| | GGCTGCCTGGTCAAGGACTACTTCC | | TCTCATAAGTGACTTCTACCCGGGA | |
| | CCGAACCGGTGACGGTGTCGTGGAA | | GCCGTGACAGTGGCCTGGAAGGCA | |
| | CTCAGGCGCCCTGACCAGCGGCGTG | | GATAGCAGCCCCGTCAAGGCGGGA | |
| | CACACCTTCCCGGCTGTCCTACAGT | | GTGGAGACCACCACACCCTCCAAA | |
| | CCTCAGGA | | CAAAGCAACAACAAGTACGCGGCC | |
| | | | AGCAGCTA | |
| S24-1384 | GAGGTGCAGCTGGTGGAGTCTGGGG | 1651 | TCCTATGTGCTGACTCAGCCACCCT | 1741 |
| | GAGGCTTGGTACAGCCTGGGGGGTC | | CGGTGTCAGTGGCCCCAGGACAGA | |
| | CCTGAGACTCTCCTGTGCAGTCTCT | | CGGCCAGGATTACCTGTGGGGGAG | |
| | GGATTCACCTTCAGTAGCTATAGCA | | ACAACATTGGAAGTAAAAATGTGC | |
| | TGAACTGGGTCCGCCAGGCTCCAGG | | ACTGGTACCAGCAGAAGCCCGGCC | |
| | GAAGGGGCTGGAGTGGGTTTCATAC | | AGGCCCCTGTGCTGGTCGTCTTTGA | |
| | ATTAGTAGTAGTAGTAGTATCATAT | | TGATAGCGACCGGCCCTCAGGGAT | |
| | ACTACGCAGACTCTGTGAAGGGCCG | | CCCTGAGCGATTCTCTGGCTCCAAC | |
| | ATTCACCATCTCCAGAGACAACGCC | | TCTGGGAACACGGCCACCCTGACC | |
| | AAGAACTCACTGTATCTGCAAATGA | | ATCAGCAGGGTCGAAGCCGGGGAT | |
| | ACAGCCTGAGAGCCGAGGACACGG | | GAGGCCGACTATTACTGTCAGGTG | |
| | CTGTGTATTACTGTGCGAGAGATTT | | TGGGATAGTAGTAGTGATCACTAT | |
| | CCTCGACTATAGCAGGTCGTATTCG | | GTGGTATTCGGCGGAGGGACCAAG | |
| | TACGGTATGGACGTCTGGGGCCAAG | | CTGACCGTCCTAGGTCAGCCCAAG | |
| | GGACCACGGTCACCGTCTCCTCAGC | | GCTGCCCCCTCGGTCACTCTGTTCC | |
| | CTCCACCAAGGGCCCATCGGTCTTC | | CGCCCTCCTCTGAGGAGCTTCAAG | |
| | CCCCTGGCACCCTCCTCCAAGAGCA | | CCAACAAGGCCACACTGGTGTGTC | |
| | CCTCTGGGGGCACAGCGGCCCTGGG | | TCATAAGTGACTTCTACCCGGGAG | |
| | CTGCCTGGTCAAGGACTACTTCCCC | | CCGTGACAGTGGCCTGGAAGGCAG | |
| | GAACCGGTGACGGTGTCGTGGAACT | | ATAGCAGCCCCGTCAAGGCGGGAG | |
| | CAGGCGCCCTGACCAGCGGCGTGCA | | TGGAGACCACCACACCCTCCAAAC | |
| | CACCTTCCCGGCTGTCCTACAGTCCT | | AAAGCAACAACAAGTACGCGGCCA | |
| | CAGGA | | GCAGCTACC | |
| S24-1476 | GAGGTGCAGCTGGTGGAGTCTGGGG | 1652 | GAAATAGTGATGACGCAGTCTCCA | 1742 |
| | GAGGCTTGGTACAGCCAGGGCGGTC | | GCCACCCTGTCTGTGTCTCCAGGGG | |
| | CCTGAGACTCTCCTGTACAGCTTCT | | AAAGAGCCACCCTCTCCTGCAGGG | |
| | GGATTCACCTTTGGTGATTATGCTAT | | CCAGTCAGAGTGTTAGCAGCAACT | |
| | GAGCTGGTTCCGCCAGGCTCCAGGG | | TAGCCTGGTACCAGCAGAAACCTG | |
| | AAGGGGCTGGAGTGGGTAGGTTTCA | | GCCAGGCTCCCAGGCTCCTCATCTA | |
| | TTAGAAGCAAAGCTTATGGTGGGAC | | TGGTGCATCCACCAGGGCCACTGG | |
| | AACACAATACGCCGCCTCTGTGAAA | | TATCCCAGCCAGGTTCAGTGGCAG | |
| | GGCAGATTCACCATCTCAAGAGATG | | TGGGTCTGGGACAGAGTTCACTCT | |
| | ATTCCAAAAGCATCGCCTATCTGCA | | CACCATCAGCAGCCTGCAGTCTGA | |
| | AATGAACAGCCTGAAAACCGAGGA | | AGATTTTGCAGTTTATTACTGTCAG | |
| | CACAGCCGTGTATTACTGTACTAGA | | CAGTATAATAACTGGTGGACGTTC | |
| | GTACGATATTGTACTAATGGTGTAT | | GGCCAAGGGACCAAGGTGGAAATC | |
| | GCTATGGCTACCACTTTGACTACTG | | AAACGAACTGTGGCTGCACCATCT | |
| | GGGCCAGGGAACCGTGGTCACCGTC | | GTCTTCATCTTCCCGCCATCTGATG | |
| | TCCTCAGCCTCCACC | | AGCAGTTGAAATCTGGAACTGCCT | |
| | | | CTGTTGTGTGCCTGCTGAATAACTT | |
| | | | CTATCCCAGAGAGGCCAAAGTACA | |
| | | | GTGGAAGGTGGATAACGC | |
| S24-1564 | CAGGTGCAGCTGCAGGAGTCGGGCC | 1653 | GACATCCAGATGACCCAGTCTCCA | 1743 |
| | CAGGACTGGTGAAGCCTTCGGAGAC | | TCCTCCCTGTCTGCATCTGTAGGAG | |
| | CCTGTCCCTCACCTGCACTGTCTCTG | | ACCGGGTCACCATCACTTGCCGGG | |
| | GTGGCTCCATCAGTAGTTACTACTG | | CAAGTCAGAGCATTAGAAGCTATT | |
| | GAGCTGGATCCGTCAGCCCCCAGGG | | TAAATTGGTATCAGCAGAAACGAG | |
| | AAGGGGCTGGAGTGGATTGGCTATG | | GGAAAGCCCCTAAGCTCCTGATCT | |
| | TCTATTACAGTGGGAACACCAAATA | | ATGCTGCATCCAGTTTGCAAAGTG | |
| | CAACCCCTCCCTCAAGAGTCGAGTC | | GGGTCCCATCAAGGTTCAGTGGCA | |
| | ACCATATCAGTAGACACGTCCAAGA | | GTGGATCTGGGACAGATTTCACTCT | |
| | ACCAGTTCTCCCTGAAGCTGGGCTC | | CACCATCAGCAGTCTGCAACCTGA | |
| | TGTGACCGCCGCGGACACGGCCGTT | | AGATTTTGCAACTTACTACTGTCAA | |
| | TATTATTGTGCGAGACATTCGAGGA | | CAGAGTTACAGTACCCCTCCGACG | |
| | TAGAAGTGGCTGGTACTCTAGACTT | | TTCGGCCAAGGGACCAAGGTGGAA | |
| | TGACTACTGGGGCCAGGGAACCCTG | | ATCAAACGAACTGTGGCTGCACCA | |
| | GTCACCGTCTCCTCAGCCTCCACCA | | TCTGTCTTCATCTTCCCGCCATCTG | |
| | AGGGCCCATCGGTCTTCCCCCTGGC | | ATGAGCAGTTGAAATCTGGAACTG | |
| | ACCCTCCTCCAAGAGCACCTCTGGG | | CCTCTGTTGTGTGCCTGCTGAATAA | |
| | GGCACAGCGGCCCTGGGCTGCCTGG | | CTTCTATCCCAGAGAGGCCAAAGT | |
| | TCAAGGACTACTTCCCCGAACCGGT | | ACAGTGGAAGGTGGATAACGC | |
| | GACGGTGTCGTGGAACTCAGGCGCC | | | |
| | CTGACCAGCGGCGTGCACACCTTCC | | | |
| | CGGCTGTCCTACAGTCCTCAGGA | | | |
| S24-1636 | CAGGTGCAGCTGGTGGAGTCTGGGG | 1654 | GAAATTGTGTTGACACAGTCTCCA | 1744 |
| | GAGGCGTGGTCCAGCCTGGGAGGTC | | GCCACCCTGTCTTTGTCTCCAGGGG | |
| | CCTGAGACTCTCCTGTGCAGCCTCT | | AAAGAGCCACCCTCTCCTGCAGGG | |
| | GGATTCACCTTCAGTAACTATGGCA | | CCAGTCAGAGTGTTAGCAGCTACT | |
| | TGCACTGGGTCCGCCAGGCTCCAGG | | TAGCCTGGTACCAACAGAAACCTG | |
| | CAAGGGGCTGGAGTGGGTGGCCGTT | | GCCAGGCTCCCAGGCTCCTCATCTA | |
| | ATATGGTATGATGGAAGTAATAAAT | | TGATGCATCCAACAGGGCCACTGG | |
| | ACTATGCAGACTCCGTGAAGGGCCG | | CATCCCAGCCAGGTTCAGTGGCAG | |
| | ATTCACCATCTCCAGAGACAATTCC | | TGGGTCTGGGACAGACTTCACTCTC | |
| | AAGAACACGCTGTATCTGCAAATGA | | ACCATCAGCAGCCTAGAGCCTGAA | |
| | ACAGCCTGAGAGCCGAGGACACGG | | GATTTTGCAGTTTATTACTGTCAGC | |
| | CTGTGTATTACTGTGCGAGAGGAGA | | AGCGTAGCAACTGGCCTCCGATCA | |
| | TTGTACTAATGGTGTATGCCATCCC | | CTTTCGGCCCTGGGACCAAAGTGG | |
| | CTTCTAATTTATTATGATAGTAGTGG | | ATATCAAACGAACTGTGGCTGCAC | |
| | TTTAGACTACTGGGGCCAGGGAACC | | CATCTGTCTTCATCTTCCCGCCATC | |
| | CTGGTCACCGTCTCCTCAGCCTCCA | | TGATGAGCAGTTGAAATCTGGAAC | |
| | CCAAGGGCCCATCGGTCTTCCCCCT | | TGCCTCTGTTGTGTGCCTGCTGAAT | |
| | GGCACCCTCCTCCAAGAGCACCTCT | | AACTTCTATCCCAGAGAGGCCAAA | |
| | GGGGGCACAGCGGCCCTGGGCTGCC | | GTACAGTGGAAGGTGGATAACGCC | |
| | TGGTCAAGGACTACTTCCCCGAACC | | CTCCAATCGGGTAACTCCCAGGAG | |
| | GGTGACGGTGTCGTGGAACTCAGGC | | AGTGTCACAGAGCAGGACAGCAAG | |
| | GCCCTGACCAGCGGCGTGCACACCT | | GACAGCACCTACAGCCTC | |
| | TCCCGGCTGTCCTACAGTCCTCAGG | | | |
| | A | | | |
| S24-1002 | CAGGTGCAGCTGGTGGAGTCTGGGG | 1655 | GCCATCCAGTTGACCCAGTCTCCAT | 1745 |
| | GAGGCGTGGTCCAGCCTGGGAGGTC | | CCTCCCTGTCTGCATCTGTAGGAGA | |
| | CCTGAGACTCTCCTGTGCAGCCTCT | | CAGAGTCACCATCACTTGCCGGGC | |
| | GGATTCACCTTCACTAGCTATGCTA | | AAGTCAGGGCATTAGCAGTGCTTT | |
| | TGCACTGGGTCCGCCAGGCTCCAGG | | AGCCTGGTATCAGCAGACACCAGG | |
| | CAAGGGGCTGGAGTGGGTGGCAGTT | | GAAAGCTCCTAAGCTCCTGATCTAT | |
| | ATATCATATGATGGAGGCAGTAAAT | | GATGCCTCCAGTTTGGAAAGTGGG | |
| | ACTACGCAGACTCCGTGAAGGGCCG | | GTCCCGTCAAGGTTCAGCGGCAGT | |
| | ATTCACCATCTCCAGAGACAATTCC | | GGATCTGGGACAGATTTCTCTCTCA | |
| | AAGAACACGCTGTATCTGCAAATGA | | CCATCGGCAGCCTGCAGCCTGAAG | |
| | ACAGCCTGAGAGCTGAGGACACGG | | ATTTTGCAAGTTATTACTGTCAACA | |
| | CTGTGTATTACTGTGCGAGGACTAC | | GTTTAATAGTTACCCTCTCACTTTC | |
| | ACCGGGTATAACAGCAGCTGGAAC | | GGCGGAGGGACCAAGGTGGAGATC | |
| | AGGGACCCTAGGGAGATACTACTAC | | AAACGAACTGTGGCTGCACCATCT | |
| | TACGGTATGGACGTCTGGGGCCAAG | | GTCTTCATCTTCCCGCCATCTGATG | |
| | GGACCACGGTCACCGTCTCCTCAGG | | AGCAGTTGAAATCTGGAACTGCCT | |
| | GAGTGCATCCGCCCCAACCCTTTTC | | CTGTTGTGTGCCTGCTGAATAACTT | |
| | CCCCTCGTCTCCTGTGAGAATTCCCC | | CTATCCCAGAGAGGCCAAAGTACA | |
| | GTCGGATACGAGCAGCGTG | | GTGGAAGGTGGATAACGCCCTCCA | |
| | | | ATCGGGTAACTCCCAGGAGAGTGT | |
| | | | CACAGAGCAGGACAGCAAGGACA | |
| | | | GCACCTACAGCCTCAGCAGCACCC | |
| | | | TGACGCTGAGCAAAGCAGACTACG | |
| | | | AGA | |
| S24-1301 | CAGGTCCAACTGGTACAGTCTGGGG | 1656 | CAGGCAGGGCTGACTCAGCCACCC | 1746 |
| | CTGAGGTGAAGAAGCCTGGGGCCTC | | TCGGTGTCCAAGGGCTTGAGACAG | |
| | AGTGAAGGTCTCCTGCAAGGTTTCC | | ACCGCCACACTCACCTGCACTGGG | |
| | GGATACACCCTCATTGAATTATCCA | | AGCAGCAACAATGTTGGCAACCAA | |
| | TGCACTGGGTGCGACAGGCTCCTGG | | GGAGCAGCTTGGTTGCAGCAGCAC | |
| | AAAAGGGCTTGAGTGGATGGGAGG | | CAGGGCCACCCTCCCAAACTCCTA | |
| | TTTTGATCCTGAAGATGGTGAAACA | | TCCTACAGGAATAACAACCGGCCC | |
| | ATCTACGCACAGAAGTTCCAGGGCA | | TCAGGGATCTCAGAGAGATTCTCT | |
| | GAGTCACCATGACCGAGGACACATC | | GCATCCAGGTCAGGAAACACAGCC | |
| | TACAGACACAGCCTACATGGCGCTG | | TCCCTGACCATTACTGGACTCCAGC | |
| | AGCAGCCTGACATCTGAGGACACGG | | CTGAGGACGAGGCAGACTATTACT | |
| | CCGTGTATTACTGTGCAACAGCCTA | | GCTCAGCATGGGACAGCAGCCTCT | |
| | CGCGTATTACTATGCTTCGGGGGGT | | CTAATTGGGTGTTCGGCGGAGGGA | |
| | TATTATACCCTTGACTACTGGGGCC | | CCAAGCTGACCGTCCTAGGTCAGC | |
| | AGGGAACCCTGGTCACCGTCTCCTC | | CCAAGGCTGCCCCCTCGGTCACTCT | |
| | AGCCTCCACCAAGGGCCCATCGGTC | | GTTCCCGCCCTCCTCTGAGGAGCTT | |
| | TTCCCCCTGGCACCCTCCTCCAAGA | | CAAGCCAACAAGGCCACACTGGTG | |
| | GCACCTCTGGGGGCACAGCGGCCCT | | TGTCTCATAAGTGACTTCTACCCGG | |
| | GGGCTGCCTGGTCAAGGACTACTTC | | GAGCCGTGACAGTGGCCTGGAAGG | |
| | CCCGAACCGGTGACGGTGTCGTGGA | | CAGATAGCAGCCCCGTCAAGGCGG | |
| | ACTCAGGCGCCCTGACCAGCGGCGT | | GAGTGGAGACCACCACACCCTCCA | |
| | GCACACCTTCCCGGCTGTCCTACAG | | AACAAAGCAACAACAAGTACGCGG | |
| | TCCTCAGGA | | CCAGCAGCTA | |
| S24-223 | CAGATCACCTTGAAGGAGTCTGGTC | 1657 | CAGTCTGCCCTGACTCAGCCTGCCT | 1747 |
| | CTACGCTGGTGAAACCCACACAGAC | | CCGTGTCTGGGTCTCCTGGACAGTC | |
| | CCTCACGCTGACCTGCACCTTCTCTG | | GATCACCATCTCCTGCACTGGAAC | |
| | GGTTCTCACTCAACACTAGTGGAGT | | CAGCAGTGACGTTGGTGGTTATAA | |
| | GGGTGTGGGCTGGATCCGTCAGCCC | | CTATGTCTCCTGGTACCAACAACAC | |
| | CCAGGAAAGGCCCTGGAGTGGCTTG | | CCAGGCAAAGCCCCCAAACTCATG | |
| | CACTCATTTATTGGGATGATGATAA | | ATTTATGATGTCAGTAATCGGCCCT | |
| | GCGCTACAGCCCATCTCTGAAGAGC | | CAGGGGTTTCTAATCGCTTCTCTGG | |
| | AGGCTCACCATCACCAAGGACACCT | | CTCCAAGTCTGGCAACACGGCCTC | |
| | CCAAAAACCAGGTGGTCCTTACAAT | | CCTGACCATCTCTGGGCTCCAGGCT | |
| | GACCAACATGGACCCTGTGGACACA | | GAGGACGAGGCTGATTATTACTGC | |
| | GCCACATATTACTGTGCACACCATA | | AACTCATATACAAGCAGCAGCACT | |
| | CGATTGTTCCAATTTTTGACTACTGG | | CTCGTGGTATTCGGCGGAGGGACC | |
| | GGCCAGGGAACCCTGGTCACCGTCT | | AAGCTGACCGTCCTAGGTCAGCCC | |
| | CCTCAGGGAGTGCATCCGCCCCAAC | | AAGGCTGCCCCCTCGGTCACTCTGT | |
| | CCTTTTCCCCCTCGTCTCCTGTGAGA | | TCCCGCCCTCCTCTGAGGAGCTTCA | |
| | ATTCCCCGTCGGATACGAGCAGCGT | | AGCCAACAAGGCCACACTGGTGTG | |
| | G | | TCTCATAAGTGACTTCTACCCGGGA | |
| | | | GCCGTGACAGTGGCCTGGAAGGCA | |
| | | | GATAGCAGCCCCGTCAAGGCGGGA | |
| | | | GTGGAGACCACCACACCCTCCAAA | |
| | | | CAAAGCAACAACAAGTACGCGGCC | |
| | | | AGCAGCTATCTGAGCCTGACGCC | |
| S24-461 | CAGGTGCAGCTGCAGGAGTCGGGCC | 1658 | TCCTATGAGCTGACACAGCCACCC | 1748 |
| | CAGGACTGGTGAAGCCTTCGGAGAC | | TCGGTGTCAGTGTCCCTAGGACAG | |
| | CCTGTCCCTCACGTGCACTGTCTCTG | | ATGGCCAGGATCACCTGCTCTGGA | |
| | GTGGCTCCATCAGTAGTTACTACTG | | GAAGCATTGCCAAAAAAATATGCT | |
| | GAGCTGGATCCGGCAGCCCCCCGGG | | TATTGGTACCAGCAGAAGCCAGGC | |
| | AAGGGACTGGAGTGGATTGGGAAT | | CAGTTCCCTATACTGGTGATATATA | |
| | ATCTATAACAGTGGGAGCACCAACT | | AAGACAGCGAGAGGCCCTCAGGGA | |
| | ACAACCCCTCCCTCAAGAGTCGACT | | TCCCTGAGCGATTCTCTGGCTCCAG | |
| | CACCATATCAGTTGACACGTCCAAG | | CTCAGGGACAATAGTCACATTGAC | |
| | AACCACTTCTCCCTGAAGCTGAGCT | | CATCAGTGGAGTCCAGGCAGAAGA | |
| | CTGTGACCGCTGCGGACACGGCCGT | | CGAGGCTGACTATTACTGTCTATCA | |
| | GTATTACTGTGCGAGAGGAGGACTA | | GAAGACAGCAGTGGTACTTGGGTG | |
| | GAGCACGACGGTGACTACGTCTACT | | TTCGGCGGAGGGACCAAGCTGACC | |
| | ACTACGGTATGGACGTCTGGGGCCA | | GTCCTAGGTCAGCCCAAGGCTGCC | |
| | AGGGACCACGATCACCGTCTCCTCA | | CCCTCGGTCACTCTGTTCCCGCCCT | |
| | GCCTCCACCAAGGGCCCATCGGTCT | | CCTCTGAGGAGCTTCAAGCCAACA | |
| | TCCCCCTGGCACCCTCCTCCAAGAG | | AGGCCACACTGGTGTGTCTCATAA | |
| | CACCTCTGGGGGCACAGCGGCCCTG | | GTGACTTCTACCCGGGAGCCGTGA | |
| | GGCTGCCTGGTCAAGGACTACTTCC | | CAGTGGCCTGGAAGGCAGATAGCA | |
| | CCGAACCGGTGACGGTGTCGTGGAA | | GCCCCGTCAAGGCGGGAGTGGAGA | |
| | CTCAGGCGCCCTGACCAGCGGCGTG | | CCACCACACCCTCCAAACAAAGCA | |
| | CACACCTTCCCGGCTGTCCTACAGT | | ACAACAAGTACGCGGCCAGCAGCT | |
| | CCTCAGGA | | A | |
| S24-511 | CAGGTGCAGCTGGTGGAGTCTGGGG | 1659 | TCCTATGAGCTGACTCAGCCACCCT | 1749 |
| | GAGGCGTGGTCCAGCCTGGGAGGTC | | CAGTGTCCGTGTCCCCAGGACAGA | |
| | CCTGAGACTCTCCTGTGCAGCCTCT | | CAGCCAGCATCACCTGCTCTGGAG | |
| | GGATTCACCTTCAGTAGCTATGGCA | | ATAAATTGGGGGATAAATATGCTT | |
| | TGCACTGGGTCCGCCAGGCTCCAGG | | GCTGGTATCAGCAGAAGCCAGGCC | |
| | CAAGGGGCTGGAGTGGGTGGCAGTT | | AGTCCCCTGTGCTGGTCATCTATCA | |
| | ATATCATATGATGGAAGTAATAAAT | | AGATAGCAAGCGGCCCTCAGGGAT | |
| | ACTATGCAGACTCCGTGAAGGGCCG | | CCCTGAGCGATTCTCTGGCTCCAAC | |
| | ATTCACCATCTCCAGAGACAATTCC | | TCTGGGAACACAGCCACTCTGACC | |
| | AAGAACACGCTGTATCTGCAAATGA | | ATCAGCGGGACCCAGGCTATGGAT | |
| | ACAGCCTGAGAGCTGAGGACACGG | | GAGGCTGACTATTACTGTCAGGCG | |
| | CTGTGTATTACTGTGCGAAATATAC | | TGGGACAGCAGCACTGTGGTATTC | |
| | GTCAACGGTAACTACGAACTACTAC | | GGCGGAGGGACCAAGCTGACCGTC | |
| | TACGGTATGGACGTCTGGGGCCAAG | | CTAGGTCAGCCCAAGGCTGCCCCC | |
| | GGACCACGGTCACCGTCTCCTCAGC | | TCGGTCACTCTGTTCCCGCCCTCCT | |
| | ACCCACCAAGGCTCCGGATGTGTTC | | CTGAGGAGCTTCAAGCCAACAAGG | |
| | CCCATCATATCAGGGTGCAGACACC | | CCACACTGGTGTGTCTCATAAGTG | |
| | CAAAGGATAACAGCCCTGTGGTCCT | | ACTTCTACCCGGGAGCCGTGACAG | |
| | GGCATGCTTGATAACTGGGTACCAC | | TGGCCTGGAAGGCAGATAGCAGCC | |
| | C | | CCGTCAAGGCGGGAGTGGAGACCA | |
| | | | CCACACCCTCCAAACAAAGCAACA | |
| | | | ACAAGTACGCGGCCAGCAGCTACC | |
| S24-788 | CAGGTGCAGCTGGTGGAGTCTGGGG | 1660 | TCCTATGAGCTGACTCAGCCACCCT | 1750 |
| | GAGGCGTGGTCCAGCCTGGGAGGTC | | CAGTGTCCGTGTCCCCAGGACAGA | |
| | CCTGAGACTCTCCTGTGCAGCGTCT | | CAGCCAGCATCACCTGCTCTGGAG | |
| | GGATTCACCTTCAGTAGCTATGGCA | | ATAAATTGGGGGATAAATATGCTT | |
| | TGCACTGGGTCCGCCAGGCTCCAGG | | GCTGGTATCAGCAGAAGCCAGGCC | |
| | CAAGGGGCTGGAGTGGGTGGCAGTT | | AGTCCCCTGTGCTGGTCATCTATCA | |
| | ATATGGTATGATGGAAGTAATAAAT | | AGATAGCAAGCGGCCCTCAGGGAT | |
| | ACTATGCAGACTCCGTGAAGGGCCG | | CCCTGAGCGATTCTCTGGCTCCAAC | |
| | ATTCACCATCTCCAGAGACAATTCC | | TCTGGGAACACAGCCACTCTGACC | |
| | AAGAACACGCTGTATCTGCAAATGA | | ATCAGCGGGACCCAGGCTATGGAT | |
| | ACAGCCTGAGAGCCGAGGACACGG | | GAGGCTGACTATTACTGTCAGGCG | |
| | CTGTGTATTACTGTGCGAGAGGACG | | TGGGACAGCAGCTCTGTGGTATTC | |
| | TTCCCCAGGTGGGGGCCACTACTAC | | GGCGGAGGGACCAAGCTGACCGTC | |
| | GGTATGGACGTCTGGGGCCAAGGG | | CTAGGTCAGCCCAAGGCTGCCCCC | |
| | ACCACGGTCACCGTCTCCTCAGGGA | | TCGGTCACTCTGTTCCCGCCCTCCT | |
| | GTGCATCCGCCCCAACCCTTTTCCCC | | CTGAGGAGCTTCAAGCCAACAAGG | |
| | CTCGTCTCCTGTGAGAATTCCCCGTC | | CCACACTGGTGTGTCTCATAAGTG | |
| | GGATACGAGCAGCGTG | | ACTTCTACCCGGGAGCCGTGACAG | |
| | | | TGGCCTGGAAGGCAGATAGCAGCC | |
| | | | CCGTCAAGGCGGGAGTGGAGACCA | |
| | | | CCACACCCTCCAAACAAAGCAACA | |
| | | | ACAAGTACGCGGCCAGCAGCTA | |
| S24-821 | CAGGTCACCTTGAGGGAGTCTGGTC | 1661 | GACATCCAGATGACCCAGTCTCCTT | 1751 |
| | CTGCGCTGGTGAAACCCACACAGAC | | CCACCCTGTCTGCATCTGTAGGAG | |
| | CCTCACACTGACCTGCACCTTCTCTG | | ACAGAGTCACCATCACTTGCCGGG | |
| | GGCTCTCACTCAGCAGTAGTGGAAT | | CCAGTCAGAGTATTAGTAGCTGGT | |
| | GTGTGTGAGCTGGATCCGTCAGCCC | | TGGCCTGGTATCAGCAGAAACCAG | |
| | CCAGGGAAGGCCCTGGAGTGGCTTG | | GGAAAGCCCCTAAGCTCCTGATCT | |
| | CACGCATTGATTGGGATGATGATAA | | ATAAGGCGTCTAGTTTAGAAAGTG | |
| | ATACTACAGCACATCTCTGAAGACC | | GGGTCCCATCAAGGTTCAGCGGCA | |
| | AGGCTCACCATCTCCAAGGACACCT | | GTGGATCTGGGACAGAATTCACTC | |
| | CCAAAAATCAGGTGGTCCTTACAAT | | TCACCATCAGCAGCCTGCAGCCTG | |
| | GACCAACATGGACCCTGTGGACACA | | ATGATTTTGCAACTTATTACTGCCA | |
| | GCCACGTATTACTGTGCACGGATAT | | ACAGTATAATAGTTATTCGTGGAC | |
| | GTACTATGGTTCGGGGACTCCATGA | | GTTCGGCCAAGGGACCAAGGTGGA | |
| | TGCTTTTGATATCTGGGGCCAAGGG | | AATCAAACGAACTGTGGCTGCACC | |
| | ACAATGGTCACCGTCTCTTCAGGGA | | ATCTGTCTTCATCTTCCCGCCATCT | |
| | GTGCATCCGCCCCAACCCTTTTCCCC | | GATGAGCAGTTGAAATCTGGAACT | |
| | CTCGTCTCCTGTGAGAATTCCCCGTC | | GCCTCTGTTGTGTGCCTGCTGAATA | |
| | GGATACGAGCAGCGTG | | ACTTCTATCCCAGAGAGGCCAAAG | |
| | | | TACAGTGGAAGGTGGATAACGC | |
| S144-67 | GAGGTGCAGCTGGTGCAGTCTGGAG | 1662 | CAGTCTGTGCTGACGCAGCCGCCC | 1752 |
| | CAGAGGTGAAAAAGCCCGGGGAGT | | TCAGTGTCTGGGGCCCCAGGGCAG | |
| | CTCTGAAGATCTCCTGTAAGGGTTC | | AGGGTCACCATCTCTTGCACTGGG | |
| | TGGATACAGCTTTACCACCTACTGG | | AGCAGGTCCAACATCGGGGCAGGT | |
| | ATCGCCTGGGTGCGCCAGATGCCCG | | TATGATGTACAGTGGTACCAGCAG | |
| | GGAAAGGCCTGGAGTGGGTGGGGA | | GTTCCAGGAACAGCCCCCAAACTC | |
| | TCATCTATCCTGATGACTCTGATACC | | CTCATCTCTGGTAACAGCAATCGG | |
| | AGATACAGCCCGTCCTTCCAAGGCC | | CCCTCAGGGGTCCCTGACCGATTCT | |
| | AGGTCACCATCTCAGCCGACAAGTC | | CTGGCTCCAAGTCTGGCACCTCAG | |
| | CATCGGTACCGCCTACCTGCAGTGG | | CCTCCCTGGCCATCACTGGGCTCCA | |
| | AGTAGCCTGAAGGCCTCGGACACCG | | GGCTGAGGATGAGGCTGATTATTA | |
| | CCATGTATTACTGTGCGAGGGGCCA | | CTGCCAGTCCTATGACAGCAGCCT | |
| | GTATTACGATTTTTGGAGCGGAGCC | | GAGTGGTCTGAGGGTATTCGGCGG | |
| | GGAGGTGTGGACGTCTGGGGCCAA | | AGGGACCAAGCTGACCGTCCTAGG | |
| | GGGACCACGGTCACCGTCTCCTCAG | | TCAGCCCAAGGCTGCCCCCTCGGT | |
| | CCTCCACCAAGGGCCCATCGGTCTT | | CACTCTGTTCCCGCCCTCCTCTGAG | |
| | CCCCCTGGCACCCTCCTCCAAGAGC | | GAGCTTCAAGCCAACAAGGCCACA | |
| | ACCTCTGGGGGCACAGCGGCCCTGG | | CTGGTGTGTCTCATAAGTGACTTCT | |
| | GCTGCCTGGTCAAGGACTACTTCCC | | ACCCGGGAGCCGTGACAGTGGCCT | |
| | CGAACCGGTGACGGTGTCGTGGAAC | | GGAAGGCAGATAGCAGCCCCGTCA | |
| | TCAGGCGCCCTGACCAGCGGCGTGC | | AGGCGGGAGTGGAGACCACCACAC | |
| | ACACCTTCCCGGCTGTCCTACAGTC | | CCTCCAAACAAAGCAACAACAAGT | |
| | CTCAGGA | | ACGCGGCCAGCAGCTATCTGAGCC | |
| | | | TGACGCCTGAGCAGTGGAAGTCCC | |
| | | | AC | |
| S144-69 | GAGGTGCAGCTGGTGCAGTCTGGAG | 1663 | GACATCCAGATGACCCAGTCTCCTT | 1753 |
| | CAGAGGTGAAAAAGCCCGGGGAGT | | CCACCCTGTCTGTATCTGTAGGAGA | |
| | CTCTGAAGATCTCCTGTAAGGGTTC | | CAGAGTCACCATCACTTGCCGGGC | |
| | TGGATACAGCTTTACCAGCTACTGG | | CAGTCAGAGTGTTAGTAGCTGGTT | |
| | ATCGGCTGGGTGCGCCAGATGCCCG | | GGCCTGGTATCAGCAGAAACCAGG | |
| | GGAAAGGCCTGGAGTGGATGGGGA | | GAAAGCCCCTAAGCTCCTGATCTA | |
| | TCATCTATCCTGGTGACTCTGATACC | | TGATGCCTCCAGTTTGGAAAGTGG | |
| | AGATACAGCCCGTCCTTCCAAGGCC | | GGTCCCATCAAGGTTCAGCGGCAG | |
| | AGGTCACCATCTCAGCCGACAAGTC | | TGGATCTGGGACAGAATTCACTCT | |
| | CATCACTACCGCCTACCTGCAGTGG | | CACCATTAGCAGCCTGCAGCCTGA | |
| | AGCAGCCTGAAGGCCTCGGACACCG | | TGATTTTGCAACTTATTACTGCCAA | |
| | CCATGTATTACTGTGCGAGGACCCA | | CAGTATAATAGTTTCTACACTTTTG | |
| | GACTACGAACTGGTTCGACTCCTGG | | GCCAGGGGACCAAGCTGGAGATCA | |
| | GGCCAGGGAACCCTGGTCACCGTCT | | AACGAACTGTGGCTGCACCATCTG | |
| | CCTCAGCCTCCACCAAGGGCCCATC | | TCTTCATCTTCCCGCCATCTGATGA | |
| | GGTCTTCCCCCTGGCACCCTCCTCCA | | GCAGTTGAAATCTGGAACTGCCTC | |
| | AGAGCACCTCTGGGGGCACAGCGG | | TGTTGTGTGCCTGCTGAATAACTTC | |
| | CCCTGGGCTGCCTGGTCAAGGACTA | | TATCCCAGAGAGGCCAAAGTACAG | |
| | CTTCCCCGAACCGGTGACGGTGTCG | | TGGAAGGTGGATAACGCCCTCCAA | |
| | TGGAACTCAGGCGCCCTGACCAGCG | | TCGGGTAACTCCCAGGAGAGTGTC | |
| | GCGTGCACACCTTCCCGGCTGTCCT | | ACAGAGCAGGACAGCAAGGACAG | |
| | ACAGTCCTCAGGA | | CACCTACAGCCTCAGCAGCACCCT | |
| | | | GACGCTGAGCAAAGCAGACTACGA | |
| | | | GAA | |
| S144-94 | CAGGTGCAGCTGGTGGAGTCTGGGG | 1664 | GATATTGTGATGACTCAGTCTCCAC | 1754 |
| | GAGGCGTGGTCCAGCCTGGGGGGTC | | TCTCCCTGCCCGTCACCCCTGGAGA | |
| | CCTGAGACTCTCCTGTGCAGCGTCT | | GCCGGCCTCCATCTCCTGCAGGTCT | |
| | GGATTCACCTTCAGTAGCTATGGCA | | AGTCAGAGCCTCCTGCATAGTAAT | |
| | TGCACTGGGTCCGCCAGGCTCCAGG | | GGATACAACTATTTGGATTGGTAC | |
| | CAAGGGGCTGGAGTGGGTGACATTT | | CTGCAGAAGCCAGGGCAGTCTCCA | |
| | ACACGGTATGATGGAAGTAATAAGT | | CAGCTCCTGATCTATTTGGGTTCTA | |
| | TCTATGCAGACTCCGTGAAGGGCCG | | ATCGGGCCTCCGGGGTCCCTGACA | |
| | ATTCTCCATCTCCAGAGACAATTCC | | GGTTCAGTGGCAGTGGATCAGGCA | |
| | AAGAACACGTTGTATCTGCAAATGA | | CAGATTTTACACTGAAAATCAGCA | |
| | ATAGTCTGAGAGCTGAGGACACGGC | | GAGTGGAGGCTGAGGATGTTGGGG | |
| | TGTATACTACTGCGCGAAAGAAAGT | | TTTATTACTGCATGCAAGCTCTACA | |
| | CGTGTGGCGTTTGGGGGAGCTATCG | | AACTCCTCAGTACACTTTTGGCCAG | |
| | CCATCTACTACTTCGGTATGGACGT | | GGGACCAAGCTGGAGATCAAACGA | |
| | CTGGGGCCAAGGGACCACGGTCACC | | ACTGTGGCTGCACCATCTGTCTTCA | |
| | GTCTCCTCAGCCTCCACCAAGGGCC | | TCTTCCCGCCATCTGATGAGCAGTT | |
| | CATCGGTCTTCCCCCTGGCGCCCTG | | GAAATCTGGAACTGCCTCTGTTGTG | |
| | CTCCAGGAGCACCTCTGGGGGCACA | | TGCCTGCTGAATAACTTCTATCCCA | |
| | GCGGCCCTGGGCTGCCTGGTCAAGG | | GAGAGGCCAAAGTACAGTGGAAG | |
| | ACTACTTCCCCGAACCGGTGACGGT | | GTGGATAACGCCCTCCAATCGGGT | |
| | GTCGTGGAACTCAGGCGCCCTGACC | | AACTCCCAGGAGAGTGTCACAGAG | |
| | AGCGGCGTGCACACCTTCCCGGCTG | | CAGGACAGCAAGGACAGCACCTAC | |
| | TCCTACAGTCCTCAGGA | | AGCCTCAGCAGCACCCTGACGCTG | |
| | | | AGCAAAGCAGACTACGAGAA | |
| S144-113 | GAGGTGCAGTTATTGGAGTCTGGGG | 1665 | GACATCCAGATGACCCAGTCTCCA | 1755 |
| | GAGGCTTGGTACAGCCTGGGGGGTC | | TCCTCCCTGTCTGCATCTGTAGGAG | |
| | CCTGAGACTCTCCTGTGCAGCCTCT | | ACAGAGTCACCATCACTTGCCGGG | |
| | GGATTCACCTTTAGCAACTATGCCA | | CAAGTCAGAGCATTAGCAACTATT | |
| | TGAGCTGGGTCCGCCAGGCTCCAGG | | TAAATTGGTATCAGCAGAAACCAG | |
| | GAAGGGGCTGGAGTGGGTCTCAGCT | | GGAAAGCCCCTGACCTCCTGATCT | |
| | ATTCGTAATAGTGGTAGTAGCACAT | | ATGCTGCATCCAGTTTGCAAAGTG | |
| | ACTATGCTGACTCCGTGAAGGGCCG | | GGGTCCCATTAAGGTTCAGTGGCA | |
| | GTTCACCATCTCCAGAGACAATTCC | | GTGGATCTGGGACAGATTTCACTCT | |
| | AAGAACACGCTGTATCTGCAAATGA | | CACCATCAGCAGTCTGCAACCTGA | |
| | ACAGCCTGAGAGCCGAGGACTCGG | | AGATTTTGCAACTTACTACTGTCAA | |
| | CCGTATATTACTGTGCGAAAGTAGG | | CAGACTTACAGTGCCCCCACTTTCG | |
| | GGGGACAGCAGCTGGTCATCCGTTT | | GCGGAGGGACCAAGGTGGAGATCA | |
| | TATGACTACTGGGGCCAGGGAACCC | | AACGAACTGTGGCTGCACCATCTG | |
| | TGGTCACCGTCTCCTCAGCCTCCAC | | TCTTCATCTTCCCGCCATCTGATGA | |
| | CAAGGGCCCATCGGTCTTCCCCCTG | | GCAGTTGAAATCTGGAACTGCCTC | |
| | GCACCCTCCTCCAAGAGCACCTCTG | | TGTTGTGTGCCTGCTGAATAACTTC | |
| | GGGGCACAGCGGCCCTGGGCTGCCT | | TATCCCAGAGAGGCCAAAGTACAG | |
| | GGTCAAGGACTACTTCCCCGAACCG | | TGGAAGGTGGATAACGCCCTCCAA | |
| | GTGACGGTGTCGTGGAACTCAGGCG | | TCGGGTAACTCCCAGGAGAGTGTC | |
| | CCCTGACCAGCGGCGTGCACACCTT | | ACAGAGCAGGACAGCAAGGACAG | |
| | CCCGGCTGTCCTACAGTCCTCAGGA | | CACCTACAGCCTCAGCAGCACCCT | |
| | CTC | | GACGCTGAGCAAAGCAGACTACGA | |
| | | | GAA | |
| S144-175 | CAGGTGCAGCTGGTGCAGTCTGGGG | 1666 | CAGTCTATGCTGACTCAGCCACCCT | 1756 |
| | CTGAGGTGAAGAAGCCTGGGGCCTC | | CAGCGTCTGGGACCCCCGGGCAGA | |
| | AGTGAAGGTCTCCTGCAAGGCTTCT | | GGGTCACCATCTCTTGTTCTGGAAG | |
| | GGATACACCTTCACCGGCTACTATA | | CAGCTCCAACATCGGAAGTAATTA | |
| | TGCACTGGGTGCGACAGGCCCCTGG | | TGTATACTGGTACCAGCAGCTCCC | |
| | ACAAGGTCTTGAGTGGATGGGACGG | | AGGAACGGCCCCCAAACTCCTCAT | |
| | ATCAACCCTAACAGTGGTGGCACAA | | CTATAGGAATAATCAGCGGCCCTC | |
| | ACTTTGCACAGAGGTTTCAGGGCAG | | AGGGGTCCCTGACCGATTCTCTGG | |
| | GGTCTCCATGACCAGGGACACCTCC | | CTCCAAGTCTGGCACCTCAGCCTCC | |
| | ATCAGCACAGCCTACATGGAACTGA | | CTGGCCATCAGTGGGCTCCGGTCC | |
| | GCAGCCTGAGATCTGACGACACGGC | | GAGGATGAGGCTGATTATTACTGT | |
| | CGTATATTACTGTGCGAGAGGCGCA | | GCAGCATGGGATGACAGACGTTGG | |
| | AAATTCGAGCACCTCCCTTTTGATA | | GTGTTCGGCGGAGGGACCAAGCTG | |
| | TCTGGGGCCAAGGGACAATGGTCAC | | ACCGTCCTAGGTCAGCCCAAGGCT | |
| | CGTCTCTTCAGCCTCCACCAAGGGC | | GCCCCCTCGGTCACTCTGTTCCCAC | |
| | CCATCGGTCTTCCCCCTGGCACCCTC | | CCTCCTCTGAGGAGCTTCAAGCCA | |
| | CTCCAAGAGCACCTCTGGGGGCACA | | ACAAGGCCACACTGGTGTGTCTCA | |
| | GCGGCCCTGGGCTGCCTGGTCAAGG | | TAAGTGACTTCTACCCGGGAGCCG | |
| | ACTACTTCCCCGAACCGGTGACGGT | | TGACAGTGGCCTGGAAGGCAGATA | |
| | GTCGTGGAACTCAGGCGCCCTGACC | | GCAGCCCCGTCAAGGCGGGAGTGG | |
| | AGCGGCGTGCACACCTTCCCGGCTG | | AGACCACCACACCCTCCAAACAAA | |
| | TCCTACAGTCCTCAGGA | | GCAACAACAAGTACGCGGCCAGCA | |
| | | | GCTA | |
| S144-208 | CAGGTGCAACTGGTGCAGTCTGGGG | 1667 | CAGTCTGCCCTGACTCAGCCTCGCT | 1757 |
| | CTGAGGTGAAGAAGCCTGGGGCCTC | | CAGTGTCCGGGTCTCCTGGACAGT | |
| | AGTGAAGGTCTCCTGCAAGTCTTCT | | CAGTCACTATCTCCTGCACTGGAAC | |
| | GGATACACCTTCACCGGCTACTATA | | CAGCAGTGATGTTGGTGGTTATAA | |
| | TGCACTGGGTGCGACAGGCCCCTGG | | GTATGTCTCCTGGTACCAACAGCA | |
| | ACAAGGGCTTGAGTGGATGGGACG | | CCCAGGCAAAGCCCCCAAACTCAT | |
| | GATCAACCCTAATAGTGGTGGCACA | | GATTTATGACGTCAGTAAGCGGCC | |
| | AACTATGCACAGAAGTTTCAGGGCA | | CTCAGGGGTCCCTGATCGCTTCTCT | |
| | GGGTCACCATGACCAGGGACACGTC | | GGCTCCAAGTCTGGCAACACGGCC | |
| | CATCAGCACAGCCTACATGGAACTG | | TCCCTGACCATCTCTGGGCTCCAGG | |
| | AGCAGGCTGAGATCTGACGACACG | | CTGAGGATGAGGGTGATTATTACT | |
| | GCCGTATATTACTGTGCGAGAGGGG | | GCTGCTCATATGCAGGCACCTACA | |
| | CCCGAGGTGGCGCGGGGTGCAGTG | | GTTTGGTATTCGGCGGAGGGACCA | |
| | GCTGGTCATGTTTTGACTTCTGGGG | | AGGTGACCGTGACCGTCCTAGGTC | |
| | CCAGGGAACCCTGGTCACCGTCTCC | | AGCCCAAGGCTGCCCCCTCGGTCA | |
| | TCAGCCTCCACCAAGGGCCCATCGG | | CTCTGTTCCCGCCCTCCTCTGAGGA | |
| | TCTTCCCCCTGGCACCCTCCTCCAAG | | GCTTCAAGCCAACAAGGCCACACT | |
| | AGCACCTCTGGGGGCACAGCGGCCC | | GGTGTGTCTCATAAGTGACTTCTAC | |
| | TGGGCTGCCTGGTCAAGGACTACTT | | CCGGGAGCCGTGACAGTGGCCTGG | |
| | CCCCGAACCGGTGACGGTGTCGTGG | | AAGGCAGATAGCAGCCCCGTCAAG | |
| | AACTCAGGCGCCCTGACCAGCGGCG | | GCGGGAGTGGAGACCACCACACCC | |
| | TGCACACCTTCCCGGCTGTCCTACA | | TCCAAACAAAGCAACAACAAGTAC | |
| | GTCCTCAGGA | | GCGGCCAGCAGCTATCTGAGCCTG | |
| | | | ACGCCTGAGCAGTGGAAGTCCCAC | |
| | | | A | |
| S144-339 | GAGGTGCAGCTGGTGGAGTCTGGGG | 1668 | GAAATTGTGTTGACGCAGTCTCCA | 1758 |
| | GAGGCCTGGTCAAGCCGGGGGGGT | | GGCACCCTGTCTTTGTCTCCAGGGG | |
| | CCCTGAGACTCTCCTGTGCAGCCTC | | AAAGAGCCACCCTCTCCTGCAGGG | |
| | TGGATTCACCTTCAGTGACTATACC | | CCAGTCAGAGTCTTAGCAGCAGCT | |
| | ATGAACTGGGTCCGACAGGCTCCAG | | ACTTAGCCTGGTACCAGCAGAAAC | |
| | GGAAGGGACTGGAGTGGGTCTCATC | | CTGGCCAGTCTCCCAGGCTCCTCAT | |
| | CATTACTAGAAGTAGTACTTACATC | | TTATGGTGCATCCAGCAGGGCCAC | |
| | TACTACGCAGACTCAGTGAAGGGCC | | TGGCATCCCAGACAGGTTCAGTGG | |
| | GATTCACCATCTCCAGAGACAACGC | | CAGTGGGTCTGGGACAGACTTCAC | |
| | CAAGAACTCACTGTATCTGCAAATG | | TCTCACCATCAACAGACTGGAGCC | |
| | AACAGCCTGAGAGCCGAGGACACG | | TGAAGATTTTGCAGTATATTACTGT | |
| | GCTGTCTATTACTGTGCGAGAGACC | | CAGCAGTATCGTACCTCACCTCGA | |
| | CCTATTACGATATTTTGACTGGTTAT | | GGCACTTTCGGCGGAGGGACCAAG | |
| | TGGAACTACTGGGGCCAGGGAACCC | | GTGGAGATCAAACGAACTGTGGCT | |
| | TGGTCACCGTCTCCTCAGCCTCCAC | | GCACCATCTGTCTTCATCTTCCCGC | |
| | CAAGGGCCCATCGGTCTTCCCCCTG | | CATCTGATGAGCAGTTGAAATCTG | |
| | GCACCCTCCTCCAAGAGCACCTCTG | | GAACTGCCTCTGTTGTGTGCCTGCT | |
| | GGGGCACAGCGGCCCTGGGCTGCCT | | GAATAACTTCTATCCCAGAGAGGC | |
| | GGTCAAGGACTACTTCCCCGAACCG | | CAAAGTACAGTGGAAGGTGGATAA | |
| | GTGACGGTGTCGTGGAACTCAGGCG | | CGCCCTCCAATCGGGTAACTCCCA | |
| | CCCTGACCAGCGGCGTGCACACCTT | | GGAGAGTGTCACAGAGCAGGACAG | |
| | CCCGGCTGTCCTACAGTCCTCAGGA | | CAAGGACAGCACCTACAGCCTCAG | |
| | | | CAGCACCCTGACGCTGAGCAAAGC | |
| | | | AGACTACGAGAA | |
| S144-359 | GAGGTGCAGCTGGTGGAGTCTGGGG | 1669 | GACATCCAGATGACCCAGTCTCCA | 1759 |
| | GAGGCTTGGTACAGCCTGGGGGGTC | | TCCTCCCTGTCTGCATCTGTAGGAG | |
| | CCTGAGACTCTCCTGTGCAGCCTCT | | ACAGAGTCACCATCACTTGCCGGG | |
| | GGATTCACCTTTAGCAGCTATGCCA | | CAAGTCAGAGCATTAGCAGCTATT | |
| | TGAGCTGGGTCCGCCAGGCTCCAGG | | TAAATTGGTATCAGCAGAAACCAG | |
| | GAAGGGGCTGGAGTGGGTCTCATCT | | GGAAAGCCCCTAAGCTCCTGATCT | |
| | ATTAGAGGTAGTGGTGGTAGCACAT | | ATGCTGCATCCAGTTTGCAAAGTG | |
| | ACTACGCAGACTCCGTGAAGGGCCG | | GGGTCCCATCAAGGTTCAGTGGCA | |
| | GTTCACCATCTCCAGAGACAACTCC | | GTGGATCTGGGACAGATTTCACTCT | |
| | AAGTACACGTTGTATCTGCAAATGA | | CACCATCAGCAGTCTGCAACCTGA | |
| | ACAGCCTGAGAGCCGAGGACACGG | | AGATTTTGCAATTTACTACTGTCAA | |
| | CCGTATATTACTGTGCGAAAATAAC | | CAGACTTCCCGTACCCCGCTCACTT | |
| | TGGAGCCGTCGGGGGGGAGAACTG | | TCGGCGGAGGGACCAAGGTGGAGG | |
| | GTTCGACCCCTGGGGCCAGGGAACC | | TCAAACGAACTGTGGCTGCACCAT | |
| | CTGGTCACCGTCTCCTCAGCCTCCA | | CTGTCTTCATCTTCCCGCCATCTGA | |
| | CCAAGGGCCCATCGGTCTTCCCCCT | | TGAGCAGTTGAAATCTGGAACTGC | |
| | GGCGCCCTGCTCCAGGAGCACCTCT | | CTCTGTTGTGTGCCTGCTGAATAAC | |
| | GGGGGCACAGCGGCCCTGGGCTGCC | | TTCTATCCCAGAGAGGCCAAAGTA | |
| | TGGTCAAGGACTACTTCCCCGAACC | | CAGTGGAAGGTGGATAACGCCCTC | |
| | GGTGACGGTGTCGTGGAACTCAGGC | | CAATCGGGTAACTCCCAGGAGAGT | |
| | GCCCTGACCAGCGGCGTGCACACCT | | GTCACAGAGCAGGACAGCAAGGAC | |
| | TCCCGGCTGTCCTACAGTCCTCAGG | | AGCACCTACAGCCTCAGCAGCACC | |
| | A | | CTGACGCTGAGCAAAGCAGACTAC | |
| | | | GAGAA | |
| S144-460 | GAGGTGCGCCTGGTGCAGTCTGGGG | 1670 | GACATCCAGATGACCCAGTCTCCA | 1760 |
| | GAGGCTTGGTAAAGCCCGGGGGGTC | | TCTGCCATGTCTGCATCTGTAGGAG | |
| | CCTGAGACTCTCCTGTGCAGCCTCT | | ACAGAGTCACCATCACTTGTCGGG | |
| | GGATTCACCTTCAGCACCGCCTGGG | | CGAGTCAGGACATTAACACCTTTTT | |
| | TGAGGTGGGTCCGCCAGGCTCCAGG | | AACGTGGTTTCAGCAGAAACCAGG | |
| | GAAGGGGCTGGAGTGCGTTGGCCG | | AAAAGTCCCTCAGCGCCTGATCTTT | |
| | AATCAAAAGTAAAAATGACGGTGA | | GCTGCATATCGTTTGCAAAGTGGG | |
| | CAGAGCAGAGTACGCTGCACCCGCG | | GTCCCTTCAAGGTTCAGTGGCAGT | |
| | AGAGGCAGATTCATCATCTCAAGAG | | GGATCTGGGACAGAATTCACTCTC | |
| | ATGATGCAGAAAACATTCTGTATTT | | ACAATCAACAGCCTGCAGCCTGAA | |
| | ACAAATGAACAACCTGAAAACCGA | | GATGTTGCGACTTATTATTGTCTAC | |
| | GGACACAGCCTTTTATTACTGTACC | | ACCATAAAACTTATCCGTACACTTT | |
| | ACGGATCAAGGAAATAGTAGTGCCT | | TGGCCAGGGGACCAAACTGGAGAT | |
| | TCTACAGTGCTGACTATTGGGGCCA | | CAAACGAACTGTGGCTGCACCATC | |
| | GGGAACCCTGGTCACCGTCTCCTCA | | TGTCTTCATCTTCCCGCCATCTGAT | |
| | GCATCCCCGACCAGCCCCAAGGTCT | | GAGCAGTTGAAATCTGGAACTGCC | |
| | TCCCGCTGAGCCTCGACAGCACCCC | | TCTGTTGTGTGCCTGCTGAATAACT | |
| | CCAAGATGGGAACGTGGTCGTCGCA | | TCTATCCCAGAGAGGCCAAAGTAC | |
| | TGCCTGGTCCAGGGCTTCTTCCCCC | | AGTGGAAGGTGGATAACGCCCTCC | |
| | AGGAGCCACTCAGTGTGACCTGGAG | | AATCGGGTAACTCCCAGGAGAGTG | |
| | CGAAAGCGGACAGAACGTGACCGC | | TCACAGAGCAGGACAGCAAGGACA | |
| | CAGAAACTTCCC | | GCACCTACAGCCTCAGCAGCACCC | |
| | | | TGACGCTGAGCAAAGCAGACTACG | |
| | | | AGAA | |
| S144-466 | GAGGTGCAGCTGGTGCAGTCTGGAG | 1671 | GACATCCAGATGACCCAGTCTCCTT | 1761 |
| | CAGAGGTGAAAAAGCCCGGGGAGT | | CCACCCTGTCTGCATCTGTGGGAG | |
| | CTCTGAAGATCTCCTGTAAGGGTTC | | ACAGAGTCACCATCACTTGCCGGG | |
| | TGGATACAGGTTTACCAGATACTGG | | CCAGTCAGAGTATTACTAGTTGGTT | |
| | ATCGGCTGGGTGCGCCAGATGCCCG | | GGCCTGGTATCAGCAGAAATCAGG | |
| | GGAAAGGCCTGGAGTGGATGGGGA | | GAAAGCCCCTAAACTCCTGATCTA | |
| | TCATCTATCTTGGTGACTCTGAAAC | | TGATGCCTCCAGTTTGGAAAGTGG | |
| | CAGATACAGTCCGTCCTTCCAAGGC | | GGTCCCATCAAGGTTCAGCGGCAG | |
| | CAGGTCACCATCTCAGCCGACAACT | | TGGATCTGGGACAGAATTCACTCT | |
| | CCATCAGCACCGCCTACCTGCAGTG | | CACCATCAGCAGCCTGCAGCCTGA | |
| | GAGCAGCCTGAAGGCCTCGGACACC | | TGATTTTGCAACTTATTACTGCCAA | |
| | GCCATGTATTACTGTGCGAGAAGTT | | CAGTATAATAGTTATCCTTGGACGT | |
| | CCAATTGGAATTACGGTGACTACTG | | TCGGCCAAGGGACCAAGGTGGAAA | |
| | GGGCCAGGGAACCCTGGTCACCGTC | | TCAAACGAACTGTGGCTGCACCAT | |
| | TCCTCAGCTTCCACCAAGGGCCCAT | | CTGTCTTCATCTTCCCGCCATCTGA | |
| | CGGTCTTCCCCCTGGCGCCCTGCTCC | | TGAGCAGTTGAAATCTGGAACTGC | |
| | AGGAGCACCTCTGGGGGCACAGCG | | CTCTGTTGTGTGCCTGCTGAATAAC | |
| | GCCCTGGGCTGCCTGGTCAAGGACT | | TTCTATCCCAGAGAGGCCAAAGTA | |
| | ACTTCCCCGAACCGGTGACGGTGTC | | CAGTGGAAGGTGGATAACGCCCTC | |
| | GTGGAACTCAGGCGCCCTGACCAGC | | CAATCGGGTAACTCCCAGGAGAGT | |
| | GGCGTGCACACCTTCCCGGCTGTCC | | GTCACAGAGCAGGACAGCAAGGAC | |
| | TACAGTCCTCAGGA | | AGCACCTACAGCCTCAGCAGCACC | |
| | | | CTGACGCTGAGCAAAGCAGACTAC | |
| | | | GAGAA | |
| S144-469 | CAGGTGCAGCTGCAGGAGTCGGGCC | 1672 | GATATTGTGATGACTCAGTCTCCAC | 1762 |
| | CAGGACTGGTGAAGCCTTCGGAGAC | | TCTCCCTGCCCGTCACCCCTGGAGA | |
| | CCTGTCCCTCACCTGCACTGTCTCTG | | GCCGGCCTCCATCTCCTGCAGGTCT | |
| | GTGGCTCCATCAGTAGTGACTACTG | | AGTCAGAGCCTCCTGCATAGTAAT | |
| | GAGCTGGATCCGGCAGCCCCCAGGG | | GGATACAACTATTTGGATTGGTAC | |
| | AAGGGACTGGAGTGGATTGGATATA | | CTGCAGAAGCCAGGGCAGTCTCCA | |
| | TGTATTACAGTGGGAGCACCAACTA | | CAGCTCCTGATCTATTTGGGTTCTA | |
| | CAACCCCTCCCTCAAGAGTCGAGTC | | ATCGGGCCTCCGGGGTCCCTGACA | |
| | ACCATATCAGTAGACACGTCCAAGA | | GGTTCAGTGGCAGTGCATCAGGCA | |
| | ACCAGTTCTCCCTGAAGCTGAGCTC | | CAGATTTTACACTGAAAATCAGCA | |
| | TGTGACCGCTGCGGACACGGCCGTG | | GAGTGGAGGCTGAGGATGTTGGGG | |
| | TATTACTGTGCGAGATGGGATAGGG | | TTTATTACTGCATGCAAGCTCTACA | |
| | GAAGCAGGCCTCACTACTACTACTA | | AGCTTTCACTTTCGGCCCTGGGACC | |
| | TGGTATGGACGTCTGGGGCCAAGGG | | AAAGTGGATATCAAACGAACTGTG | |
| | ACCACGGTCACCGTCTCCTCAGCCT | | GCTGCACCATCTGTCTTCATCTTCC | |
| | CCACCAAGGGCCCATCGGTCTTCCC | | CGCCATCTGATGAGCAGTTGAAAT | |
| | CCTGGCACCCTCCTCCAAGAGCACC | | CTGGAACTGCCTCTGTTGTGTGCCT | |
| | TCTGGGGGCACAGCGGCCCTGGGCT | | GCTGAATAACTTCTATCCCAGAGA | |
| | GCCTGGTCAAGGACTACTTCCCCGA | | GGCCAAAGTACAGTGGAAGGTGGA | |
| | ACCGGTGACGGTGTCGTGGAACTCA | | TAACGCCCTCCAATCGGGTAACTC | |
| | GGCGCCCTGACCAGCGGCGTGCACA | | CCAGGAGAGTGTCACAGAGCAGGA | |
| | CCTTCCCGGCTGTCCTACAGTCCTCA | | CAGCAAGGACAGCACCTACAGCCT | |
| | GGA | | CAGCAGCACCCTGACGCTGAGCAA | |
| | | | AGCAGACTACGAGA | |
| S144-509 | GAGGTGCAGCTGGTGCAGTCTGGAG | 1673 | GACATCCAGATGACCCAGTCTCCTT | 1763 |
| | CAGAGGTGAAAAAGCCCGGGGAGT | | CCACCCTGTCTGCATCTGTAGGAG | |
| | CTCTGAAGATCTCCTGTAAGGGTTC | | ACAGAGTCACCATCACTTGCCGGG | |
| | TGCATACACCTTTACCACCTACTGG | | CCAGTCAGAGTATTAGTAGCTGGT | |
| | ATCGGCTGGGTGCGCCAGATGCCCG | | TGGCCTGGTATCAGCAGAAACCAG | |
| | GGAAAGGCCTGGAGTGGATGGGGA | | GGAAAGCCCCTAACCTCCTGATCT | |
| | TCATCTATCCTGGTGACTCTGATACC | | ATGATGCCTCCAGTTTGGAAAGTG | |
| | AGATACAGCCCGTCCTTCCAAGGCC | | GGGTCCCATCAAGGTTCAGCGGCA | |
| | AGGTCACCATCTCAGCCGACAAGTC | | GTGGATCTGGGACAGAATTCACTC | |
| | CATCAGCACCGCCTACCTGCAGTGG | | TCACCATCAGCAGCCTGCAGCCTG | |
| | AGCAGCCTGAAGGCCTCGGACACCG | | ATGATTTTGCAACTTATTACTGCCA | |
| | CCATGTATTACTGTGCGAGATTATT | | ACAGTATAATAGTTATCCGTGGAC | |
| | ATTGGTGGCTGGTCCCTTTGACTACT | | GTTCGGCCAAGGGACCAAGGTGGA | |
| | GGGGCCAGGGAACCCTGGTCACCGT | | AATCAAACGAACTGTGGCTGCACC | |
| | CTCCTCAGCCTCCACCAAGGGCCCA | | ATCTGTCTTCATCTTCCCGCCATCT | |
| | TCGGTCTTCCCCCTGGCACCCTCCTC | | GATGAGCAGTTGAAATCTGGAACT | |
| | CAAGAGCACCTCTGGGGGCACAGC | | GCCTCTGTTGTGTGCCTGCTGAATA | |
| | GGCCCTGGGCTGCCTGGTCAAGGAC | | ACTTCTATCCCAGAGAGGCCAAAG | |
| | TACTTCCCCGAACCGGTGACGGTGT | | TACAGTGGAAGGTGGATAACGC | |
| | CGTGGAACTCAGGCGCCCTGACCAG | | | |
| | CGGCGTGCACACCTTCCCGGCTGTC | | | |
| | CTACAGTCCTCAGGACTCTACTCCC | | | |
| | TCAGCAGCGTGGTGACCGTGCCCTC | | | |
| | CAGCAGCTTGGGCACCCAGACCTAC | | | |
| | ATCTGCAACGTGAATCACAAGCCCA | | | |
| | GCAACACCAAGGTGGACA | | | |
| S144-516 | CAGGTGCAGCTGCTGCAGTCTGGGG | 1674 | CAGTCTGTGCTGACGCAGCCGCCC | 1764 |
| | CTGAAGTGAAGAAGCCTGGGGCCTC | | TCAGTGTCTGAGGCCCCAGGGCAG | |
| | AGTGAAGGTCTCCTGCAAGGCTTCT | | AGGGTCACCATCTCCTGCACTGGG | |
| | GGATACACCTTCACCGGCTACTATA | | AGCAGCTCCAACATCGGGGCAGGT | |
| | TGCACTGGGTGCGACAGGCCCCTGG | | TATGATGTACACTGGTACCAGCAG | |
| | ACAAGGGCTTGAGTGGATGGGACG | | CTTCCAGGAACAGCCCCCAAACTG | |
| | GATCAACCCTAACAGTGGTGGCACA | | CTCATCTATGGTAACATTAATCGGC | |
| | AATTATGCACAGAAGTTTCAGGGCA | | CCTCAGGGGTCCCTGACCGATTCTC | |
| | GGGTCACCATGACCAGGGACACGTC | | TGGCTCCAAGTCTGGCACCTCAGC | |
| | CATCAGCACAGCCTACATGGAGCTG | | CTCCCTGGCCATCACTGGGCTCCAG | |
| | AGCAGGCTGACATCTGACGACACGG | | GCTGAGGATGAGGCTGATTATTAC | |
| | CCGTGTATTACTGTGCGACCAAAAC | | TGCCAGTCCTATGACAACAGCCTG | |
| | TGGAATTGATCGCTACTACTACTAC | | AATGGTTCGGTGTTCGGCGGAGGG | |
| | TACATGGACGTCTGGGGCAAAGGG | | ACCAAACTGACCGTCCTACGTCAG | |
| | ACCACGGTCACCGTCTCCTCAGCCT | | CCCAAGGCTGCCCCCTCGGTCACTC | |
| | CCACCAAGGGCCCATCGGTCTTCCC | | TGTTCCCACCCTCCTCTGAGGAGCT | |
| | CCTGGCACCCTCCTCCAAGAGCACC | | TCAAGCCAACAAGGCCACACTGGT | |
| | TCTGGGGGCACAGCGGCCCTGGGCT | | GTGTCTCATAAGTGACTTCTACCCG | |
| | GCCTGGTCAAGGACTACTTCCCCGA | | GGAGCCGTGACAGTGGCCTGGAAG | |
| | ACCGGTGACGGTGTCGTGGAACTCA | | GCAGATAGCAGCCCCGTCAAGGCG | |
| | GGCGCCCTGACCAGCGGCGTGCACA | | GGAGTGGAGACCACCACACCCTCC | |
| | CCTTCCCGGCTGTCCTACAGTCCTCA | | AAACAAAGCAACAACAAGTACGCG | |
| | GGA | | GCCAGCAGCTA | |
| S144-568 | CAGGTGCAGCTGCAGGAGTCGGGCC | 1675 | GAAATTGTGTTGACGCAGTCTCCA | 1765 |
| | CAGGACTGGTGAAGCCTTCGGAGAC | | GGCACCCTGTCTTTGTCTCCAGGGG | |
| | CCTGTCCCTCACCTGCAGTGTCTCTG | | AAAGAGCCACCCTCTCATGTAGGG | |
| | GTGGCTCCATCAGTGATTACTACTG | | CCAGTCAGAGTGTTAGCAGCAACT | |
| | GAGCTGGATCCGGCAGCCCCCTGGG | | TCCTAGCCTGGTACCAGCAGAAAC | |
| | AAGGGACTGGAGTGGATTGGATATA | | CTGGCCAGCCTCCCAGGCTCCTCAT | |
| | TCTATAACAGTGGGAGTACCAACTA | | CTATGGTGCATCCGTCAGGGCCAC | |
| | CAACCCCTCCCTCAAGAGTCGAGTC | | TGGCATCCCAGACAGGTTCAGTGG | |
| | ACCATATCAGCAGACCCGTCCAAGA | | CAGTGGGTCTGGGACAGACTTCAC | |
| | ACCAGTTCTCCCTGAAGTTGAGCTC | | TCTCACCATCACCAGACTGGAGCC | |
| | TGTGACCGCCGCAGACACGGCCGTA | | TGAAGATTTTGCAGTATATTACTGT | |
| | TATTACTGTGCGAGACCTCACGGCG | | CAGCAGTATGGTAGCTTACCTCGG | |
| | GTGACTACGCTTTTGATATTTGGGG | | ACGTTCGGCCAAGGGACCAAGGTG | |
| | CCAAGGGACAATGGTCACCGTCTCT | | GAAATCAAACGAACTGTGGCTGCA | |
| | TCAGCATCCCCGACCAGCCCCAAGG | | CCATCTGTCTTCATCTTCCCGCCAT | |
| | TCTTCCCGCTGAGCCTCGACAGCAC | | CTGATGAGCAGTTGAAATCTGGAA | |
| | CCCCCAAGATGGGAACGTGGTCGTC | | CTGCCTCTGTTGTGTGCCTGCTGAA | |
| | GCATGCCTGGTCCAGGGCTTCTTCC | | TAACTTCTATCCCAGAGAGGCCAA | |
| | CCCAGGAGCCACTCAGTGTGACCTG | | AGTACAGTGGAAGGTGGATAACGC | |
| | GAGCGAAAGCGGACAGAACGTGAC | | CCTCCAATCGGGTAACTCCCAGGA | |
| | CGCCAGAAACTTCCC | | GAGTGTCACAGAGCAGGACAGCAA | |
| | | | GGACAGCACCTACAGCCTCAGCAG | |
| | | | CACCCTGACGCTGAGCAAAGCAGA | |
| | | | CTACGAGA | |
| S144-576 | CAGGTCCAGCTGGTGCAATCTGGGG | 1676 | CATCCAGATGACCCAGTCTCCTTCC | 1766 |
| | CTGAGGTGATGAAGCCTGGGTCCTC | | ACCCTGTCTGCATCTGTAGGAGAC | |
| | GGTGAAGGTCTCCTGCAAGGCTTCT | | AGAGTCACCATCACTTGCCGGGCC | |
| | GGAGGCACCTTCAGCAGCTATAGTA | | AGTCAGAGTATTAGTAGCTGGTTG | |
| | TCACCTGGGTGCGACAGGCCCCTGG | | GCCTGGTATCAGCAGAAACCAGGG | |
| | ACAAGGGCTTGAGTGGATGGGAAG | | AAAGCCCCTAAGCTCCTGATCTAT | |
| | GATCATCCCTATCCTTGGTATAGCA | | GATGCCTCCAGTTTGCAAAGTGGG | |
| | AACTACGCACAGAAGTTCCAGGGCA | | GTCCCATCAAGGTTCAGCGGCAGT | |
| | GAGTCACGATTACCGCGGACAAATC | | GGATCTGGGACAGAATTCACTCTC | |
| | CACGAGCACAGCCTACATGGAGCTG | | ACCATCAGCAGCCTGCAGCCTGAT | |
| | AGCAGCCTGAGATCTGAGGACACG | | GATTTTGCAACTTATTACTGCCAAC | |
| | GCCGTGTATTACTGTGCGAGAGGGT | | AGTATAATAGTTATTCTCCGATCAC | |
| | ATAGTGGGAGCCCCTCGAATTTAGA | | CTTCGGCCAAGGGACACGACTCGA | |
| | CGGTATGGACGTCTGGGGCCAAGGG | | GATTAAACGAACTGTGGCTGCACC | |
| | ACCACGGTCACCGTCTCCTCAGCCT | | ATCTGTCTTCATCTTCCCGCCATCT | |
| | CCACCAAGGGCCCATCGGTCTTCCC | | GATGAGCAGTTGAAATCTGGAACT | |
| | CCTGGCACCCTCCTCCAAGAGCACC | | GCCTCTGTTGTGTGCCTGCTGAATA | |
| | TCTGGGGGCACAGCGGCCCTGGGCT | | ACTTCTATCCCAGAGAGGCCAAAG | |
| | GCCTGGTCAAGGACTACTTCCCCGA | | TACAGTGGAAGGTGGATAACGCCC | |
| | ACCGGTGACGGTGTCGTGGAACTCA | | TCCAATCGGGTAACTCCCAGGAGA | |
| | GGCGCCCTGACCAGCGGCGTGCACA | | GTGTCACAGAGCAGGACAGCAAGG | |
| | CCTTCCCGGCTGTCCTACAGTCCTCA | | ACAGCACCTACAGCCTCAGCAGCA | |
| | GGA | | CCCTGACGCTGAGCAAAGCAGACT | |
| | | | ACGAGAA | |
| S144-588 | CAGCTGCAGCTGCAGGAGTCGGGCC | 1677 | TCCTATGAGCTGACTCAGCCACCCT | 1767 |
| | CAGGACTGGTGAAGCCTTCGGAGAC | | CAGTGTCCGTGTCCCCAGGACAGA | |
| | CCTGTCCCTCACCTGCACTGTCTCTG | | CAGCCAGCATCACCTGCTCTGGAG | |
| | GTGGCTCCATCAGCAGTAGTAGTTA | | ATAAATTGGGGGATAAATATGCTT | |
| | CTACTGGGGCTGGATCCGCCAGCCC | | GCTGGTATCAGCAAAAGCCAGGCC | |
| | CCAGGGAAGGGGCTGGAGTGGATT | | AGTCCCCTGTGCTGGTCATCTATCA | |
| | GGGAGTATCTATTATAGTGGGAGCA | | AGATACCAAGCGGCCCTCAGGGAT | |
| | CCTACTACAACCCGTCCCTCAAGAG | | CCCTGAGCGATTCTCTGGCTCCAAC | |
| | TCGATTCACCATATCCGTAGACACG | | TCTGGGAACACAGCCACTCTGACC | |
| | TCCAAGAACCAGTTCTCCCTGAAGC | | ATCAGCGGGACCCAGGCTATGGAT | |
| | TGAGCTCTGTGACCGCCGCAGACAC | | GAGGCTGACTATTACTGTCAGGCG | |
| | GGCTGTGTATTACTGTGCGGCCTAT | | TGGGACAGTAGCACTGTGTTATTC | |
| | CAGAGGAAACTAGGATATTGTCGTG | | GGCGGAGGGACCAAGCTGACCGTC | |
| | GTAATAGCTGCTTTTCCTGCTTCGAC | | CTAGGTCAGCCCAAGGCTGCCCCC | |
| | CCCTGGGGCCAGGGAACCCTGGTCA | | TCGGTCACTCTGTTCCCGCCCTCCT | |
| | CCGTCTCCTCAGCCTCCACCAAGGG | | CTGAGGAGCTTCAAGCCAACAAGG | |
| | CCCATCGGTCTTCCCCCTGGCACCCT | | CCACACTGGTGTGTCTCATAAGTG | |
| | CCTCCAAGAGCACCTCTGGGGGCAC | | ACTTCTACCCGGGAGCCGTGACAG | |
| | AGCGGCCCTGGGCTGCCTGGTCAAG | | TGGCCTGGAAGGCAGATAGCAGCC | |
| | GACTACTTCCCCGAACCGGTGACGG | | CCGTCAAGGCGGGAGTGGAGACCA | |
| | TGTCGTGGAACTCAGGCGCCCTGAC | | CCACACCCTCCAAACAAAGCAACA | |
| | CAGCGGCGTGCACACCTTCCCGGCT | | ACAAGTACGCGGCCAGCAGCTATC | |
| | GTCCTACAGTCCTCAGGA | | TGAGCCTGACGCCTGAGCAGTGGA | |
| | | | AGTCCCACA | |
| S144-628 | GAGGTGCACCTGGTGCAGTCTGGAG | 1678 | CAGTCTGTGCTGACGCAGCCGCCC | 1768 |
| | CAGAGGTGAAACAGCCCGGGGAGT | | TCAATGTCTGGGGCCCCAGGGCAG | |
| | CTCTGAAGATCTCCTGTAAGGGTTC | | AGGGTCACCATCTCCTGCACTGGG | |
| | TGGATACAACTTTGCCACCTACTGG | | AGCAGCTCCAACATCGGGGCAGGT | |
| | ATCGCCTGGGTGCGCCAGATGCCCG | | TATGATGTACACTGGTACCAGCAG | |
| | GGAAAGGCCTGGAGTGGATGGGGA | | CTTCCAGGAGCAGCCCCCAAACTC | |
| | TCATCTATCCTGGTGACTCTGATACC | | CTCATCTATGGTGACACCAGTCGG | |
| | AGATACAGCCCGTCCTTCCAAGGCC | | CCCTCAGGGGTCCCTGACCGATTCT | |
| | AGGTCATCATCTCAGCCGACAAGTC | | CTGGCTCCAAGTCTGACACCTCAG | |
| | CATCGGCACCGCCTTCCTGCAGTGG | | CCTCCCTGGCCATCACTGGGCTCCA | |
| | AGCAGCCTGAAGGCCTCGGACACCG | | GGCTGAGGATGAGGCTGATTATTA | |
| | CCATGTATTACTGTGCGAGGCGGGG | | CTGCCAGTCCTTTGACAGAAGTCTG | |
| | GTATAGTAGCTCTAACTATCGCGTT | | AGTGGTCTCGTGATTTTCGGCGGA | |
| | GACGAATACTATTACTACGGTATGG | | GGGACCAGGCTGACCGTCCTCGGT | |
| | ACGTCTGGGGCCAAGGGACCACGGT | | CAGCCCAAGGCTGCCCCCTCGGTC | |
| | CACCGTCTCCTCAGCATCCCCGACC | | ACTCTGTTCCCACCCTCCTCTGAGG | |
| | AGCCCCAAGGTCTTCCCGCTGAGCC | | AGCTTCAAGCCAACAAGGCCACAC | |
| | TCTGCAGCACCCAGCCAGATGGGAA | | TGGTGTGTCTCATAAGTGACTTCTA | |
| | CGTGGTCATCGCCTGCCTGGTCCAG | | CCCGGGAGCCGTGACAGTGGCCTG | |
| | GGCTTCTTCCCCCAGGAGCCACTCA | | GAAGGCAGATAGCAGCCCCGTCAA | |
| | GTGTGACCTGGAGCGAAAGCGGAC | | GGCGGGAGTGGAGACCACCACACC | |
| | AGGGCGTGACCGCCAGAAACTTCCC | | CTCCAAACAAAGCAACAACAAGTA | |
| | C | | CGCGGCCAGCAGCTAAGATCGGAA | |
| | | | GAGC | |
| S144-740 | CAGGTGCAGCTGGTGCAGTCTGGGG | 1679 | GAAGTTGTGTTGACGCAGTCTCCA | 1769 |
| | CTGAGGTGAAGAAGCCTGGGGCCTC | | GGCACCCTGTCTTTGTCTCCAGGGG | |
| | AGTGAAGGTCTCCTGCAAGGCTTCT | | AAAGAGCCACCCTCTCCTGCAGGG | |
| | GGATACACCTTCACCGGCTACTATA | | CCAGTCAGAGTGTTAGCAGCAGCT | |
| | TGCACTGGGTGCGACAGGCCCCTGG | | ACTTAGCCTGGTACCAGCAGAAAC | |
| | ACAAGGGCTTGAGTGGATGGGACG | | CTGGCCAGGCTCCCAGGCTCGTCA | |
| | GATCAACCCTAACAGTGGTGACACA | | TCTATGGTGCATCCAGCAGGGCCA | |
| | AACTATGCACAGAAGTTTCAGGGCA | | CTGGCATCCCAGACAGGTTCAGTG | |
| | GGGTCACCATGACCAGGGACACGTC | | GCAGTGGGTCTGGGACAGACTTCA | |
| | CATCAGCACAGCCTACATGGAGCTG | | CTCTCACCATCAGCAGACTGGAGC | |
| | AGCAGGCTGAGATCTGACGACACG | | CTGAAGATTTTGCAGTGTATTACTG | |
| | GCCGTGTATTACTGTGCGAGATTGG | | TCAGCAGTTTGGTAGCTCTCCCACC | |
| | GTAAAGGAATGGCAGCAGCCCGTA | | TTCGGCCGAGGGACACGACTGGAG | |
| | CTGTCTTTGACTCCTGGGGCCAGGG | | ATTAAACGAACTGTGGCTGCACCA | |
| | AACCCTGGTCACCGTCTCCTCAGCC | | TCTGTCTTCATCTTCCCGCCATCTG | |
| | TCCACCAAGGGCCCATCGGTCTTCC | | ATGAGCAGTTGAAATCTGGAACTG | |
| | CCCTGGCACCCTCCTCCAAGAGCAC | | CCTCTGTTGTGTGCCTGCTGAATAA | |
| | CTCTGGGGGCACAGCGGCCCTGGGC | | CTTCTATCCCAGAGAGGCCAAAGT | |
| | TGCCTGGTCAAGGACTACTTCCCCG | | ACAGTGGAAGGTGGATAACGCCCT | |
| | AACCGGTGACGGTGTCGTGGAACTC | | CCAATCGGGTAACTCCCAGGAGAG | |
| | AGGCGCCCTGACCAGCGGCGTGCAC | | TGTCACAGAGCAGGACAGCAAGGA | |
| | ACCTTCCCGGCTGTCCTACAGTCCTC | | CAGCACCTACAGCCTCAGCAGCAC | |
| | AGGA | | CCTGACGCTGAGCAAAGCAGACTA | |
| | | | CGAGAA | |
| S144-741 | CAGGTGCACCTGGTGCAGTCTGGGG | 1680 | CAGTCTGTGCTGACTCAGCCACCCT | 1770 |
| | CTGAGGTGAAGAAGCCTGGGGCCTC | | CAGCGTCTGGGACCCCCGGGCAGA | |
| | AGTGAAGGTCTCCTGCAAGGCTTCT | | GGGTCACCATCTCTTGTTCTGGAAG | |
| | GGATACACCTTCACCGGCTACTATA | | CAGCTCCAACATCGGAAGTAATAC | |
| | TGAACTGGGTGCGACAGGCCCCTGG | | TGTAAACTGGTACCAGCAGCTCCC | |
| | ACAAGGGCTTGAGTGGATGGGACG | | AGGAACGGCCCCCAAGCTCCTCAT | |
| | GATCAACCCTAACAGTGGTGGCACA | | CTATAGTAATAATCAGCGGCCCTC | |
| | AACTATGCACAGAAGTTTCAGGGCA | | AGGGGTCCCTGACCGATTCTCTGG | |
| | GGGTCACCATGACCAGGGACACGTC | | CTCCAAGTCTGGCACCTCAGCCTCC | |
| | CATCAGCACAGCCTACATGGAACTG | | CTGGCCATCAGTGGGCTCCAGTCT | |
| | AGCAGGCTGAGATCTGACGACGCG | | GAGGATGAGGCTGATTATTACTGT | |
| | GCCGTGTATTACTGTGCGAGAGCTG | | GCAGCATGGGATGACAGCCTGAAT | |
| | AGAGGTATAGCAGCAGCTGGTACA | | GGTGTGGTATTCGGCGGAGGGACC | |
| | ATCTTTACTACTGGGGCCAGGGAAC | | AAGCTGACCGTCCTAGGTCAGCCC | |
| | CCTGGTCACCGTCTCCTCAGCCTCC | | AAGGCTGCCCCCTCGGTCACTCTGT | |
| | ACCAAGGGCCCATCGGTCTTCCCCC | | TCCCGCCCTCCTCTGAGGAGCTTCA | |
| | TGGCACCCTCCTCCAAGAGCACCTC | | AGCCAACAAGGCCACACTGGTGTG | |
| | TGGGGGCACAGCGGCCCTGGGCTGC | | TCTCATAAGTGACTTCTACCCGGGA | |
| | CTGGTCAAGGACTACTTCCCCGAAC | | GCCGTGACAGTGGCCTGGAAGGCA | |
| | CGGTGACGGTGTCGTGGAACTCAGG | | GATAGCAGCCCCGTCAAGGCGGGA | |
| | CGCCCTGACCAGCGGCGTGCACACC | | GTGGAGACCACCACACCCTCCAAA | |
| | TTCCCGGCTGTCCTACAGTCCTCAG | | CAAAGCAACAACAAGTACGCGGCC | |
| | GA | | AGCAGCTATCTGAGCCTGACGCCT | |
| | | | GAGCAGTGGAAGTCCCACA | |
| S144-803 | GAGGTGCAGCTGGTGCAGTCTGGAG | 1681 | GACATCCAGATGACCCAGTCTCCTT | 1771 |
| | CAGAGGTGAAAAAGCCCGGGGAGT | | CCACCCTGTCTGCATCTGTAGGAG | |
| | CTCTGAAGATCTCCTGTAAGGGTTC | | ACAGAGTCACCATCACTTGCCGGG | |
| | TAGATACAGCTTTACCAGATACTGG | | CCAGTCAGAGTATTAGTAGTTGGTT | |
| | ATCGCCTGGGTGCGCCAGATGCCCG | | GGCCTGGTATCAGCAGAAACCAGG | |
| | GGAAAGGCCTGGAGTGGATGGGGA | | GAAAGCCCCTAAGCTCCTGATCTA | |
| | TCATCTATCCTGGTGACTCTGATACC | | TGATGCCTCCAGTTTGGAAAGTGG | |
| | AGATACAGCCCGTCCTTCCAAGGCC | | GGTCCCATCAAGGTTCAGCGGCAG | |
| | CGGTCACCATCTCAGCCGACAAGTC | | TGGATCTGGGACAGAATTCACTCT | |
| | CATCAGCACCGCCTACCTGCAGTGG | | CACCATCAGCAGCCTGCAGCCTGA | |
| | AGCAGCCTGAAGGCCTCGGACACCG | | TGATTTTGCAACTTATTACTGCCAA | |
| | CCATATATTACTGTGCGAGACTCCC | | CAGTATAATATTTACCCGTACACTT | |
| | GAACAGTAACTACGTTGACTACTGG | | TTGGCCAGGGGACCAAGCTGGACA | |
| | GGCCAGGGAACCCTGGTCACCGTCT | | TCAAACGAACTGTGGCTGCACCAT | |
| | CCTCAGCCTCCACCAAGGGCCCATC | | CTGTCTTCATCTTCCCGCCATCTGA | |
| | GGTCTTCCCCCTGGCACCCTCCTCCA | | TGAGCAGTTGAAATCTGGAACTGC | |
| | AGAGCACCTCTGGGGGCACAGCGG | | CTCTGTTGTGTGCCTGCTGAATAAC | |
| | CCCTGGGCTGCCTGGTCAAGGACTA | | TTCTATCCCAGAGAGGCCAAAGTA | |
| | CTTCCCCGAACCGGTGACGGTGTCG | | CAGTGGAAGGTGGATAACGCCCTC | |
| | TGGAACTCAGGCGCCCTGACCAGCG | | CAATCGGGTAACTCCCAGGAGAGT | |
| | GCGTGCACACCTTCCCGGCTGTCCT | | GTCACAGAGCAGGACAGCAAGGAC | |
| | ACAGTCCTCAGGACTCTACTCCCTC | | AGCACCTACAGCCTCAGCAGCACC | |
| | AGCAGCGTGGTGACCGTGCCCTCCA | | CTGACGCTGAGCAAAGCAGACTAC | |
| | GCAGCTTGGGCACCCAGACCTACAT | | GAGAA | |
| | CTGCAACGTGAATCACAAGCCCAGC | | | |
| | AACACCAAGGTGGACAA | | | |
| S144-843 | CAGGTGCAGCTGGTGGAGTCTGGGG | 1682 | GAAATTGTGTTGACGCAGTCTCCA | 1772 |
| | GAGGCGTGGTCCAGCCTGGGGGGTC | | GGCACCCTGTCTTTGTCTCCAGGGG | |
| | CGTAAGACTCTCCTGTGCAGCGTCT | | AAAGAGCCACCCTCTCCTGCAGGG | |
| | GGATTCGACTTCACTAATAATGGCA | | CCAGTCAGACTGTTACCAGCAGGT | |
| | TGTATTGGGTCCGCCAGGCTCCAGG | | ACTTAGCCTGGTATCAGCAGAAGC | |
| | CAAGGGGCTGGAGTGGGTGGCATTT | | CTGGCCAGGCTCCCAGGCTCCTCAT | |
| | ATACGGTATGATGGAAATAAACAA | | CTATGGTGCATCCACCAGGGCCAC | |
| | GACTATGCAGACTCCGTGAAGGGCC | | TGGCATCCCAGACAGGTTCAGTGG | |
| | GATTCACCATCTCCAGAGACAATTC | | CAGTGGGTCTGGGACAGACTTCAC | |
| | CAAAAACACTCTGTATCTGCAAATG | | TCTCACCATCAGCAGACTGGAGCC | |
| | AGCAGCCTTAGACCTGAGGACACGG | | TGAAGATTTTGCAGTGTATTACTGT | |
| | CTGTATATTACTGTGCGAAAGGTGT | | CAGCAGTATGGTAATTCACCTCCGT | |
| | TTATACTGAAAATTACGGCTGGGGC | | ACACTTTTGGCCAGGGGACCAAGC | |
| | CAGGGAACCCTGGTCACCGTCTCCT | | TGGAGATCAAACGAACTGTGGCTG | |
| | CAGGGACCACGGTCACCGTCTCCTC | | CACCATCTGTCTTCATCTTCCCGCC | |
| | AGCCTCCACCAAGGGCCCATCGGTC | | ATCTGATGAGCAGTTGAAATCTGG | |
| | TTCCCCCTGGCGCCCTGCTCCAGGA | | AACTGCCTCTGTTGTGTGCCTGCTG | |
| | GCACCTCCGAGAGCACAGCGGCCCT | | AATAACTTCTATCCCAGAGAGGCC | |
| | GGGCTGCCTGGTCAAGGACTACTTC | | AAAGTACAGTGGAAGGTGGATAAC | |
| | CCCGAACCGGTGACGGTGTCGTGGA | | GCCCTCCAATCGGGTAACTCCCAG | |
| | ACTCAGGCGCTCTGACCAGCGGCGT | | GAGAGTGTCACAGAGCAGGACAGC | |
| | GCACACCTTCCCAGCTGTCCTACAG | | AAGGACAGCACCTACAGCCTCAGC | |
| | TCCTCAGGACTCTACTCCCTCAGCA | | AGCACCCTGACGCTGAGCAAAGCA | |
| | GCGTGGTGACCGTGCCCTCCAGCAA | | GACTACGAGAA | |
| | CTTCGGCACCCAGACCTACACCTGC | | | |
| | AACGTAGATCACAAGCCCAGCAAC | | | |
| | ACCAAGGTGGACAA | | | |
| S144-877 | CAGGTGCAGCTGGTGGAGTCTGGGG | 1683 | GACATCCAGATGACCCAGTCTCCA | 1773 |
| | GAGGCGTGGTCCAGCCTGGGAGGTC | | TCCTCCCTGTCTGCATCTGTAGGAG | |
| | CCTGAGACTCTCCTGTGCAGCCTCT | | ACAGAGTCACCATCACTTGCCAGG | |
| | GGATTCACCTTCAGTACCTATGGCA | | CGAGTCAGGACATTAGCAACTATT | |
| | TGCACTGGGTCCGCCAGGCTCCAGG | | TAAATTGGTATCAGCAGAAACCAG | |
| | CAAGGGGCTGGAGTGGGTGGCAGTT | | GGAAAGCCCCTAAGCTCCTGATCT | |
| | ATATCATATGATGGAAGTAATAAAT | | ACGATGCATCGAATTTGGAAACAG | |
| | ATTATGCAGACTCCGTGAAGGGCCG | | GGGTCCCATCAAGGTTCAGTGGAA | |
| | ATTCACCATCTCCAGAGACAATTCC | | GTGGATCTGGGACAGATTTTAGTTT | |
| | AAGAACACGCTGTATCTGCAAATGA | | TAGTATCAGCAGCCTGCAGCCTGA | |
| | ACAGCCTGAGAGCTGAGGACACGG | | AGATATTGCAACATATTACTGTCA | |
| | CTGTGTATTACTGTGCGAAACAGCA | | ACAGTATGATAATGTCCCTCTTACT | |
| | AGGCACCTATTGCAGTGGTGGTAAC | | TTCGGCGGAGGGACCAAGGTGGAG | |
| | TGCTACTCGGGATATTTTGACTACT | | ATCAAACGAACTGTGGCTGCACCA | |
| | GGGGCCAGGGAACCCTGGTCACCGT | | TCTGTCTTCATCTTCCCGCCATCTG | |
| | CTCCTCAGCCTCCACCAAGGGCCCA | | ATGAGCAGTTGAAATCTGGAACTG | |
| | TCGGTCTTCCCCCTGGCACCCTCCTC | | CCTCTGTTGTGTGCCTGCTGAATAA | |
| | CAAGAGCACCTCTGGGGGCACAGC | | CTTCTATCCCAGAGAGGCCAAAGT | |
| | GGCCCTGGGCTGCCTGGTCAAGGAC | | ACAGTGGAAGGTGGATAACGCCCT | |
| | TACTTCCCCGAACCGGTGACGGTGT | | CCAATCGGGTAACTCCCAGGAGAG | |
| | CGTGGAACTCAGGCGCCCTGACCAG | | TGTCACAGAGCAGGACAGCAAGGA | |
| | CGGCGTGCACACCTTCCCGGCTGTC | | CAGCACCTACAGCCTCAGCAGCAC | |
| | CTACAGTCCTCAGGACTCTACTCCC | | CCTGACGCTGAGCAAAGCAGACTA | |
| | TCAGCAGCGTGGTGACCGTGCCCTC | | CGAGAA | |
| | CAGCAGCTTGGGCACCCAGACCTAC | | | |
| | ATCTGCA | | | |
| S144-952 | CAGGTTCAGCTGGTGCAGTCTGGAG | 1684 | GACATCGTGATGACCCAGTCTCCA | 1774 |
| | CTGAGGTGAAGAAGCCTGGGGCCTC | | GACTCCCTGGCTGTGTCTCTGGGCG | |
| | AGTGAAGGTCTCCTGCACGGCTTCT | | AGAGGGCCACCATCAACTGCAAGT | |
| | GGTTACACCGTTACCAGTTATGGTA | | CCAGCCAGAGTGTTTTAAACAGCT | |
| | TCAGCTGGGTGCGACAGGCCCCTGG | | CCAACAATAAGAACTACTTAGCTT | |
| | ACAAGGGCTTGAGTGGATGGGATG | | GGTACCAGCAGAAACCAGGACAGC | |
| | GATCAGCACTTACAATGGTAACACA | | CTCCTAAGCTGCTCATTTACTGGGC | |
| | AACTATGCACAGAAGCTCCAGGGCA | | ATCTACCCGGGAATCCGGGGTCCC | |
| | GAGTCACCATGACCACAGACACATC | | TGACCGATTCAGTGGCAGCGGGTC | |
| | CACGAGCACAGCCTACATGGAGCTG | | TGGGACAGATTTCACTCTCACCATC | |
| | AGGAGCCTGAGATCTGACGACACG | | AGCAGCCTGCAGGCTGAAGATGTG | |
| | GCCGTGTATTACTGTGCGAGAGAAT | | GCAGTTTATTACTGTCAGCAGTATT | |
| | ACAGCTATGGTTACCGACTGGCCTA | | ATAGTACTCCTCAGACGTTCGGCC | |
| | CTTTGACTACTGGGGCCAGGGAACC | | AAGGGACCAAGGTGGAAATCAAAC | |
| | CTGGTCACCGTCTCCTCAGGGAGTG | | GAACTGTGGCTGCACCATCTGTCTT | |
| | CATCCGCCCCAACCCTTTTCCCCCTC | | CATCTTCCCGCCATCTGATGAGCAG | |
| | GTCTCCTGTGAGAATTCCCCGTCGG | | TTGAAATCTGGAACTGCCTCTGTTG | |
| | ATACGAGCAGCGTGGCCGTTGGCTG | | TGTGCCTGCTGAATAACTTCTATCC | |
| | CCTCGCACAGGACTTCCTTCCCGAC | | CAGAGAGGCCAAAGTACAGTGGAA | |
| | TCCATCACTTTCTCCTGGAAATACA | | GGTGGATAACGCCCTCCAATCGGG | |
| | AGAACAACTCTGACATCAGCAGCAC | | TAACTCCCAGGAGAGTGTCACAGA | |
| | CCGGGGCTTCCCATCAGTCCTGAGA | | GCAGGACAGCAAGGACAGCACCTA | |
| | GGGGGCAAGTACGCAGCCACCTCAC | | CAGCCTCAGCAGCACCCTGACGCT | |
| | AGGTGCTGCTGCCTTCCAAGGACGT | | GAGCAAAGCAGACTACGAGA | |
| | CATG | | | |
| S144-971 | GAGGTGCAGCTGGTGGAGTCTGGGG | 1685 | GACATCGTGATGACCCAGTCTCCA | 1775 |
| | GAGGCTTGGTCCAGCCTGGGGGGTC | | GACTCCCTGGCTGTGTCTCTGGGCG | |
| | CCTGAGAATCTCTTGTTCAGCCTCTG | | AGAGGGCCACCATCAACTGCAAGT | |
| | GATTCACCTTCAGTAGATATGCTAT | | CCAGCCAGAGTGTTTTATACAGCTC | |
| | GCACTGGGTCCGCCAGGCTCCAGGG | | CAACAATAAGAACTTCTTAACTTG | |
| | AAGGGACTGGAATATGTTTCAGCTA | | GTACCAGCAGAAACCAGGACAGCC | |
| | TTAGGAGTAATGGGGGTAGCACATA | | TCCTAAGCTGCTCATTTACTGGGCA | |
| | CTACGCAGACTCCGTGAGGGGCAGA | | TCTACCCGGGAATCCGGGGTCCCT | |
| | TTCACCATCTCCAGAGACAATTCCA | | GACCGATTCAGTGGCAGCGGGTCT | |
| | GGAACACGCTGTATCTTCAAATGAG | | GGGACAGATTTCACTCTCACCATC | |
| | CAGTCTGAGAGCTGAGGACACGGCT | | AGCAGCCTGCAGGCTGAAGATGTG | |
| | GTGTATTACTGTGTGATAATAAACA | | GCAGTTTATTACTGTCAGCAATATT | |
| | ATTTAGCAGCAGCTGGTACCCGTTT | | ATACTACTCCGTGGACGTTCGGCC | |
| | TGACTACTGGGGCCAGGGAACCCTG | | AAGGGACCAAGGTGGAAATCAAAC | |
| | GTCACCGTCTCCTCAGCCTCCACCA | | GAACTGTGGCTGCACCATCTGTCTT | |
| | AGGGCCCATCGGTCTTCCCCCTGGC | | CATCTTCCCGCCATCTGATGAGCAG | |
| | ACCCTCCTCCAAGAGCACCTCTGGG | | TTGAAATCTGGAACTGCCTCTGTTG | |
| | GGCACAGCGGCCCTGGGCTGCCTGG | | TGTGCCTGCTGAATAACTTCTATCC | |
| | TCAAGGACTACTTCCCCGAACCGGT | | CAGAGAGGCCAAAGTACAGTGGAA | |
| | GACGGTGTCGTGGAACTCAGGCGCC | | GGTGGATAACGCCCTCCAATCGGG | |
| | CTGACCAGCGGCGTGCACACCTTCC | | TAACTCCCAGGAGAGTGTCACAGA | |
| | CGGCTGTCCTACAGTCCTCAGGA | | GCAGGACAGCAAGGACAGCACCTA | |
| | | | CAGCCTCAGCAGCACCCTGACGCT | |
| | | | GAGCAAAGCAGACTACGAGAA | |
| S144-1036 | CAGGTGCAGCTACAGCAGTGGGGC | 1686 | GACATCGTGATGACCCAGTCTCCA | 1776 |
| | GCAGGGCTGTTGAAGCCTTCGGAGA | | GACTCCCTGGCTGTGTCTCTGGGCG | |
| | CCCTGTCCCTCACCTGCGCTGTCTAT | | AGAGGGCCACCATCAACTGCAACT | |
| | GGTGGGTCCTTCAGTGGTTACTTCT | | CCAGCCAGAGTGTTTTATACAGCTC | |
| | GGAGCTGGATCCGCCAGCCCCCAGG | | CATCAATAAGAACTACTTAGCTTG | |
| | GAAGGGGCTGGAGTGGATTGGGGA | | GTACCAGCAGAAACCAGCACAGCC | |
| | AATCAATCATAGTGGAAGCACCAAC | | TCCTAAGGTGCTCATTTACTGGGCA | |
| | TACAACCCGTCCCTCAAGAGTCGAG | | TCTACCCGGGAATCCGGGGTCCCT | |
| | TCACCATATCAGTAGACACGTCCAA | | GACCGATTCAGTGGCAGCGGGTCT | |
| | GAACCAGTTCTCCCTGAAGCTGAGC | | GGGACAGATTTCACTCTCACCATC | |
| | TCTGTGACCGCCGCGGACACGGCTG | | AGCAGCCTGCAGGCTGAAGATGTG | |
| | TGTATTACTGTGCGAGAGCGCCCTA | | GCAGTTTATTACTGTCAGCAATATT | |
| | TTACGATTTCTTGCGGGAAGGAAAC | | ATAGGACTCCCTGGACGTTCGGCC | |
| | TGGTTCGACCCCTGGGGCCAGGGAA | | AAGGGACCAAGGTGGAAATCAAAC | |
| | CCCTGGTCACCGTCTCCTCAGCCTCC | | GAACTGTGGCTGCACCATCTGTCTT | |
| | ACCAAGGGCCCATCGGTCTTCCCCC | | CATCTTCCCGCCATCTGATGAGCAG | |
| | TGGCACCCTCCTCCAAGAGCACCTC | | TTGAAATCTGGAACTGCCTCTGTTG | |
| | TGGGGGCACAGCGGCCCTGGGCTGC | | TGTGCCTGCTGAATAACTTCTATCC | |
| | CTGGTCAAGGACTACTTCCCCGAAC | | CAGAGAGGCCAAAGTACAGTGGAA | |
| | CGGTGACGGTGTCGTGGAACTCAGG | | GGTGGATAACGCCCTCCAATCGGG | |
| | CGCCCTGACCAGCGGCGTGCACACC | | TAACTCCCAGGAGAGTGTCACAGA | |
| | TTCCCGGCTGTCCTACAGTCCTCAG | | GCAGGACAGCAAGGACAGCACCTA | |
| | GACTCTACTCCCTCAGCAGCGTGGT | | CAGCCTCAGCAGCACCCTGACGCT | |
| | GACCGTGCCCTCCAGCAGCTTGGGC | | GAGCAAAGCAGACTACGAGAA | |
| | ACCCAGACCTACATCTGCAACGTGA | | | |
| | ATCACAAGCCCAGC | | | |
| S144-1079 | CAGGTCCAGCTGGTGCAATCTGGGG | 1687 | GAAATTGTGTTGACGCAGTCTCCA | 1777 |
| | CTGAGGTGAAGAAGCCTGGGTCCTC | | GGCACCCTGTCTTTGTCTCCAGGGG | |
| | GGTGAAGGTCTCCTGCAAGGCTTCT | | AAAGAGCCACCCTCTCCTGCAGGG | |
| | GGAGACACCTTCGGCAGCTATAGTA | | CCAGTCAGAGTGTTAGCAGCAACT | |
| | TCACCTGGGTGCGACAGGCCCCTGG | | ACTTAGCCTGGTACCAGCAGAAAC | |
| | ACAAGGACTTGAGTGGATGGGAAG | | CTGGCCAGGCTCCCAGGCTCCTCAT | |
| | GATCATCCCTGTCCTTGGTATAGCA | | CTATGGTGCATCCAGCAGGGCCAC | |
| | AACTACGCACAGAAGTTCCAGGGCA | | TGGCATCCCAGAGAGGTTCAGTGG | |
| | GAGTCACGATTACCGCGGACAAATC | | CAGTGGGTCTGGGACAGACTTCAC | |
| | CACGAGCACAGCCTACATGGAGCTG | | TCTCACCATCAGCAGACTGGAGCC | |
| | AGCAGCCTGAGATCTGAGGACACG | | TGAAGATTTTGCAGTGTATTACTGT | |
| | GCCGTGTATTACTGTGCGGGAGGGG | | CAGCAGTATGGTAGGTCACCGTAC | |
| | GTTGTAGTGGTGGTAACTGCTACTC | | ACTTTTGGCCAGGGGACCAAGCTG | |
| | GTGGTACAACTGGTTCGACCCCTGG | | GAGATCAAACGAACTGTGGCTGCA | |
| | GGCCAGGGATCCCTGGTCACCGTCT | | CCATCTGTCTTCATCTTCCCGCCAT | |
| | CCTCAGCCTCCACCAAGGGCCCATC | | CTGATGAGCAGTTGAAATCTGGAA | |
| | GGTCTTCCCCCTGGCACCCTCCTCCA | | CTGCCTCTGTTGTGTGCCTGCTGAA | |
| | AGAGCACCTCTGGGGGCACAGCGG | | TAACTTCTATCCCAGAGAGGCCAA | |
| | CCCTGGGCTGCCTGGTCAAGGACTA | | AGTACAGTGGAAGGTGGATAACGC | |
| | CTTCCCCGAACCGGTGACGGTGTCG | | CCTCCAATCGGGTAACTCCCAGGA | |
| | TGGAACTCAGGCGCCCTGACCAGCG | | GAGTGTCACAGAGCAGGACAGCAA | |
| | GCGTGCACACCTTCCCGGCTGTCCT | | GGACAGCACTTACAGCCTCAGCAG | |
| | ACAGTCCTCAGGA | | CACCCTGACGCTGAGCAAAGCAGA | |
| | | | CTACGAGAA | |
| S144-1299 | CAGGTGCAGCTGCAGGAGTCGGGCC | 1688 | CAGTCTGTGCTGACTCAGCCACCCT | 1778 |
| | CAGGACTGGTGAAGCCTTCGGAGAC | | CAGCGTCTGGGACCCCCGGGCAGA | |
| | CCTGTCCCTCACCTGCACTGTCTCTG | | GGGTCACCATCTCTTGTTCTGGAAG | |
| | GTGGCTCCATCAGTAGTTACTACTG | | CAGCTCCAACATCGGAAGTAATTA | |
| | GAGCTGGATCCGGCAGCCCCCAGGG | | TGTATACTGGTACCAGCAGCTCCC | |
| | AAGGGACTGGAGTGGATTGGGTATA | | AGGAACGGCCCCCAAACTCCTCAT | |
| | TCAATTACAGGGGGATCACCAACTA | | CTATAGGAATAATCAGCGGCCCTC | |
| | CAACCCCTCCCTCAAGAGTCGAGTC | | AGGGGTCCCTGACCGATTCTCTGG | |
| | ACCATATCAGTAGACATGTCCAAGA | | CTCCAAGTCTGGCACCTCAGCCTCC | |
| | ACCAGTTCTCCCTGAAGCTGAGCTC | | CTGGCCATCAGTGGGCTCCGGTCC | |
| | TGTGACCGCCGCAGACACGGCCGTG | | GAGGATGAGGCTGATTATTACTGT | |
| | TATTCCTGTGCGAGACTAGCAGTGG | | GCAGCATGGGATGACAGCCTGAGT | |
| | CTAGTCGAGGGACCGTTGACTACTG | | GTTAATGTGGTATTCGGCGGAGGG | |
| | GGGCCAGGGAACCCTGGTCACCGTC | | ACCAAGCTGACCGTCCTAGGTCAG | |
| | TCCTCAGCCTCCACCAAGGGCCCAT | | CCCAAGGCTGCCCCCTCGGTCACTC | |
| | CGGTCTTCCCCCTGGCACCCTCCTCC | | TGTTCCCGCCCTCCTCTGAGGAGCT | |
| | AAGAGCACCTCTGGGGGCACAGCG | | TCAAGCCAACAAGGCCACACTGGT | |
| | GCCCTGGGCTGCCTGGTCAAGGACT | | GTGTCTCATAAGTGACTTCTACCCG | |
| | ACTTCCCCGAACCGGTGACGGTGTC | | GGAGCCGTGACAGTGGCCTGGAAG | |
| | GTGGAACTCAGGCGCTCTGACCAGC | | GCAGATAGCAGCCCCGTCAAGGCG | |
| | GGCGTGCACACCTTCCCAGCTGTCC | | GGAGTGGAGACCACCAAACCCTCC | |
| | TACAGTCCTCAGGACTCTACTCCCT | | AAACAGAGCAACAACAAGTACGCG | |
| | CAGCAGCGTGGTGACCGTGCCCTCC | | GCCAGCAGCTACCTGAGCCTGACG | |
| | AGCAACTTCGGCACCCAGACCTACA | | CCTGAGCAGTGGAAGTCCCACA | |
| | CCTGCAACGTAGATCACAAGCCCAG | | | |
| | CAACACCAAGGTGGAC | | | |
| S144-1339 | CAGGTGCAGCTGGTGCAGTCTGGGA | 1689 | CAGTCTGCCCTGACTCAGCCTGCCT | 1779 |
| | CTGAGGTGAAGAAGCCTGGGGCCTC | | CCGTGTCTGGGTCTCCTGGACAGTC | |
| | AGTGAAGGTCTCCTGCAAGGCTTCT | | GATCACCATCTCCTGCACTGGAAC | |
| | GGATACACCTTCACCGACTACTATA | | CAACAGTGACGTTGGTGGTTATAA | |
| | TGCACTGGGTGCGACAGGCCCCTGG | | CTATGTCTCCTGGTACCAACAACAC | |
| | ACAAGGGCTTGAGTGGATGGGACG | | CCAGGCAAAGCCCCCAGACTCATG | |
| | GATCAACCCTACCAGTGGTGGCACA | | ATTTATGATGTCAGTAATCGGCCCT | |
| | AACTATCCACAGAAGTTTCAGGGCA | | CAGGGGTTTCTAATCGCTTCTCTGG | |
| | GTGTCACCATGACCAGGGACACGTC | | CTCCAAGTCTGGCAACACGGCCTC | |
| | CCTCAGCACAGTCTACATGGAACTG | | CCTGACCATCTCTGGGCTCCAGGCT | |
| | AGCGGGCTGAGATCTGACGACACG | | GAGGACGAGGCTGATTATTACTGC | |
| | GCCGTCTATTATTGTGCGAGAGAGA | | AGCTCATATACAAGCAGCAGCACT | |
| | GGGTTACTCTGATTCAGGGAAAGAA | | CTCGTGGTTTTCGGCGGAGGGACC | |
| | CCACTACTACATGGACGTCTGGGGC | | AAGCTGACCGTCCTAGGTCAGCCC | |
| | ACAGGGACCACGGTCACCGTCTCCT | | AAGGCTGCCCCCTCGGTCACTCTGT | |
| | CAGCCTCCACCAAGGGCCCATCGGT | | TCCCGCCCTCCTCTGAGGAGCTTCA | |
| | CTTCCCCCTGGCACCCTCCTCCAAG | | AGCCAACAAGGCCACACTGGTGTG | |
| | AGCACCTCTGGGGGCACAGCGGCCC | | TCTCATAAGTGACTTCTACCCGGGA | |
| | TGGGCTGCCTGGTCAAGGACTACTT | | GCCGTGACAGTGGCCTGGAAGGCA | |
| | CCCCGAACCGGTGACGGTGTCGTGG | | GATAGCAGCCCCGTCAAGGCGGGA | |
| | AACTCAGGCGCCCTGACCAGCGGCG | | GTGGAGACCACCACACCCTCCAAA | |
| | TGCACACCTTCCCGGCTGTCCTACA | | CAAAGCAACAACAAGTACGCGGCC | |
| | GTCCTCAGGA | | AGCAGCTATCTGAGCCTGACGCCT | |
| | | | GAGCAGTGGAAGTCCCACA | |
| S144-1406 | CAGGTCCAGCTTGTGCAGTCTGGGG | 1690 | GACATCCAGATGACCCAGTCTCCTT | 1780 |
| | CTGAGGTGAAGAAGCCTGGGGCCTC | | CCACCCTGTCTGCATCTGTAGGAG | |
| | AGTGAAGGTTTCCTGCAAGGCTTCT | | ACAGAGTCACCATCACTTGCCGGG | |
| | GGATATACCTTCACTACCTATGCTA | | CCAGTCAGAGTATTAGTAGCTGGT | |
| | TGCATTGGGTGCGCCAGGCCCCCGG | | TGGCCTGGTATCAGCAGAAACCAG | |
| | ACAAAGGCTTGAGTGGATGGGATG | | GGAAAGCCCCTAAGCTCCTGATCT | |
| | GATCAACGCTGGCAATGGTAACACA | | ATGATGCCTCCAGTTTGGAAAGTG | |
| | AAATATTCACAGAACTTCCAGGGCA | | GGGTCCCATCAAGGTTCAGCGGCA | |
| | GAGTCACCATTACCAGGGACACATC | | GTGGATCTGGGACAGAATTCACTC | |
| | CGCGAGCACAGCCTACATGGAGCTG | | TCACCATCAGCAGCCTGCAGCCTG | |
| | AGCAGCCTGAGATCTGAAGACACG | | ATGATTTTGCAACTTATTACTGCCA | |
| | GCTGTGTATTACTGTGCGAGTCTCG | | ACAGTATAATAGTTATCCGTGGAC | |
| | TGGGTGGGGATAGCAGCAGCTGGTA | | GTTCGGCCAAGGGACCAAGGTGGA | |
| | TGACTACATGGACGTCTGGGGCAAA | | AATCAAACGAACTGTGGCTGCACC | |
| | GGGACCACGGTCACCGTCTCCTCAG | | ATCTGTCTTCATCTTCCCGCCATCT | |
| | CCTCCACCAAGGGCCCATCGGTCTT | | GATGAGCAGTTGAAATCTGGAACT | |
| | CCCCCTGGCGCCCTGCTCCAGGAGC | | GCCTCTGTTGTGTGCCTGCTGAATA | |
| | ACCTCCGAGAGCACAGCGGCCCTGG | | ACTTCTATCCCAGAGAGGCCAAAG | |
| | GCTGCCTGGTCAAGGACTACTTCCC | | TACAGTGGAAGGTGGATAACGCCC | |
| | CGAACCGGTGACGGTGTCGTGGAAC | | TCCAATCGGGTAACTCCCAGGAGA | |
| | TCAGGCGCTCTGACCAGCGGCGTGC | | GTGTCACAGAGCAGGACAGCAAGG | |
| | ACACCTTCCCAGCTGTCCTACAGTC | | ACAGCACCTACAGCCTCAGCAGCA | |
| | CTCAGGACTCTACTCCCTCAGCAGC | | CCCTGACGCTGAGCAAAGCAGACT | |
| | GTGGTGACCGTGCCCTCCAGCAACT | | ACGAGAA | |
| | TCGG | | | |
| S144-1407 | CAGGTCCAGCTGGTGCAATCTGGGG | 1691 | GACATCCAGATGACCCAGTCTCCTT | 1781 |
| | CTGAGGTGAAGAAGCCTGGGTCCTC | | CCACCCTGTCTGCATCTGTAGGAG | |
| | GGTGAAGGTCTCCTGCAAGGCTTCT | | ACAGAGTCACCATCACTTGCCGGG | |
| | GGAGGCACCTTCAGCAGCTATACTA | | CCAGTCAGAGTATTAGTAGCTGGT | |
| | TCAGCTGGGTGCGACAGGCCCCTGG | | TGGCCTGGTATCAGCAGAAACCAG | |
| | ACAAGGCCTTGAGTGGATGGGAAG | | GGAAAGCCCCTAAGCTCCTGATCT | |
| | GATCATCCCTGTCCGTGATATAGCA | | ATGATGCCTCCAGTTTGGAAAGTG | |
| | AACTACGCACAGAAGTTCCAGGGCA | | GGGTCCCATCAAGGTTCAGCGGCA | |
| | GAGTCACGATTACCGCGGACAAATC | | GTGGATCTGGGACAGAATTCACTC | |
| | CACGAGGACAGCCTACATGGAGGT | | TCACCGTCAGCAGCCTGCAGCCTG | |
| | GAGCAGCCTGAGATCTGAGGACAC | | ATGATTTTGCAACTTATTACTGCCA | |
| | GGCCGTGTATTACTGTGCGGCAACG | | ACAGTATAATAATTATTCTCCCATC | |
| | GAGCTCCGCTCGGATGGTCTTGACA | | ACTTTTGGCCAGGGGACCAAGCTG | |
| | TCTGGGGCCAAGGGACAATGGTCAC | | GAGATCAAACGAACTGTGGCTGCA | |
| | CGTCTCTTCAGCCTCCACCAAGGGC | | CCATCTGTCTTCATCTTCCCGCCAT | |
| | CCATCGGTCTTCCCCCTGGCACCCTC | | CTGATGAGCAGTTGAAATCTGGAA | |
| | CTCCAAGAGCACCTCTGGGGGCACA | | CTGCCTCTGTTGTGTGCCTGCTGAA | |
| | GCGGCCCTGGGCTGCCTGGTCAAGG | | TAACTTCTATCCCAGAGAGGCCAA | |
| | ACTACTTCCCCGAACCGGTGACGGT | | AGTACAGTGGAAGGTGGATAACGC | |
| | GTCGTGGAACTCAGGCGCCCTGACC | | CCTCCAATCGGGTAACTCCCAGGA | |
| | AGCGGCGTGCACACCTTCCCGGCTG | | GAGTGTCACAGAGCAGGACAGCAA | |
| | TCCTACAGTCCTCAGGA | | GGACAGCACCTACAGCCTCAGCAG | |
| | | | CACCCTGACGCTGAGCAAAGCAGA | |
| | | | CTACGAGAA | |
| S144-1569 | CAGGTTCAGCTGGTGCAGTCTGGAG | 1692 | CAGCCTGTGCTGACTCAGCCACCTT | 1782 |
| | CTGAGGTGAAGAAGCCTGGGGCCTC | | CTGCATCAGCCTCCCTGGGAGCCTC | |
| | AGTGAAGGTCTCCTGCAAGGCTTCT | | GGTCACACTCACCTGCACCCTGAG | |
| | GGTTACACCTTTTCCAACTACGGTA | | CAGCGGCTACAGTAATTATAAAGT | |
| | TCAGCTGGGTGCGACAGGCCCCTGG | | GGACTGGTACCAGCAGAGACCAGG | |
| | ACAAGGGCTTGAGTGGATGGGATG | | GAAGGGCCCCCAGTTTGTGATGCG | |
| | GATCAGCGCTTACAATGGTAACACT | | AGTGGGCACTGGTGGGATTGTGGG | |
| | AAGTATCCACAAAAGCTCCAGGGCA | | ATCCAAGGGGGATGGCATCCCTGA | |
| | GAGTCACCATGAGCACAGACACATC | | TCGCTTCTCAGTCTTGGGCTCAGGC | |
| | CACGAGCACAGCCTACATGGAGCTG | | CTGAATCGGTACCTGACCATCAAG | |
| | AGGAGCCTGAGATCTGACGACACG | | AACATCCAGGAAGAGGATGAGAGT | |
| | GCCGTGTATTACTGTGCGAGAGAGA | | GACTACCACTGTGGGGCAGACCAT | |
| | CGCGGTACGGTATGGACGTCTGGGG | | GGCAGTGGGAGCAACTTCGTTCGG | |
| | CCAAGGGACCACGGTCACCGTCTCC | | GTGTTCGGCGGAGGGACCAAGCTG | |
| | TCAGCCTCCACCAAGGGCCCATCGG | | ACCGTCCTAGGTCAGCCCAAGGCT | |
| | TCTTCCCCCTGGCACCCTCCTCCAAG | | GCCCCCTCGGTCACTCTGTTCCCAC | |
| | AGCACCTCTGGGGGCACAGCGGCCC | | CCTCCTCTGAGGAGCTTCAAGCCA | |
| | TGGGCTGCCTGGTCAAGGACTACTT | | ACAAGGCCACACTGGTGTGTCTCA | |
| | CCCCGAACCGGTGACGGTGTCGTGG | | TAAGTGACTTCTACCCGGGAGCCG | |
| | AACTCAGGCGCCCTGACCAGCGGCG | | TGACAGTGGCCTGGAAGGCAGATA | |
| | TGCACACCTTCCCGGCTGTCCTACA | | GCAGCCCCGTCAAGGCGGGAGTGG | |
| | GTCCTCAGGA | | AGACCACCACACCCTCCAAACAAA | |
| | | | GCAACAACAAGTACGCGGCCAGCA | |
| | | | GCTACCTGAGCCTGACGCCTGAGC | |
| | | | AGTGGAAGTCCCAC | |
| S144-1641 | GAGGTGCAGCTGGTGCAGTCTGGAG | 1693 | GACATCCAGATGACCCAGTCTCCTT | 1783 |
| | CAGAGGTGAAAAAGCCCGGGGAGT | | CCACCCTGTCTGCATCTGTAGGAG | |
| | CTCTGAAGATCTCCTGTAAGGGTTC | | AGAGAGTCACCATCACTTGCCGGG | |
| | TGGATACACCTTTACCAGCTACTGG | | CCAGTCAGAGTATTAGTAGGTGGT | |
| | ATCGGCTGGGTGCGCCAGATGCCCG | | TGGCCTGGTATCAGCAGAAACCAG | |
| | GGAAAGGCCTGGAGTGGATGGGGA | | GGAAAGCCCCTAAACTCCTTATCT | |
| | TCATCTATCTTGGTGACTCTGATACG | | ATGATGCCTCCAGTTTGGAAAGTG | |
| | AGATACAGCCCGTCCTTCCAAGGCC | | GGGTCCCATCAAGGTTCAGCGGCA | |
| | AGGTCACCATCTCAGCCGACAAGTC | | GTGGATCTGGGACAGAATTCACTC | |
| | CATCAGCACCGCCTACCTGCAGTGG | | TCACCATCAGCAGCCTGCAGCCTG | |
| | AACAGCCTGAAGGCCTCGGACACCG | | ATGATTTTGCAACTTATCACTGCCA | |
| | CCATGTATTACTGTGCGAGACAGGT | | CCAGTATAGTACTTATTCGCTCACT | |
| | TACCGGAACTACGAGCTGGTTCGAC | | TTCGGCGGAGGGACCAAGGTGGAC | |
| | CCCTGGGGCCAGGGAACCCTGGTCA | | ATCAAACGAACTGTGGCTGCACCA | |
| | CCGTCTCCTCAGCCTCCACCAAGGG | | TCTGTCTTCATCTTCCCGCCATCTG | |
| | CCCATCGGTCTTCCCCCTGGCACCCT | | ATGAGCAGTTGAAATCTGGAACTG | |
| | CCTCCAAGAGCACCTCTGGGGGCAC | | CCTCTGTTGTGTGCCTGCTGAATAA | |
| | AGCGGCCCTGGGCTGCCTGGTCAAG | | CTTCTATCCCAGAGAGGCCAAAGT | |
| | GACTACTTCCCCGAACCGGTGACGG | | ACAGTGGAAGGTGGATAACGCCCT | |
| | TGTCGTGGAACTCAGGCGCCCTGAC | | CCAATCGGGTAACTCCCAGGAGAG | |
| | CAGCGGCGTGCACACCTTCCCGGCT | | TGTCACAGAGCAGGACAGCAAGGA | |
| | GTCCTACAGTCCTCAGGA | | CAGCACCTACAGCCTCAGCAGCAC | |
| | | | CCTGACGCTGAGCAAAGCAGACTA | |
| | | | CGAGAA | |
| S144-1827 | GAGGTGCAGCTGGTGGAGTCTGGGG | 1694 | GAAATTGTGTTGACGCAGTCTCCA | 1784 |
| | GAGACGTGGTCCAGCCTGGGGGGTC | | GGCACCCTGTCTTTGTCTCCAGGGG | |
| | CCTGAGACTCTCCTGTGCAGCCTCT | | AAAGAGCCACCCTCTCCTGCAGGG | |
| | GGAATTACCTTTAGTAACTATTGGA | | CCAGTCAGAGTATTAGCAACAGCT | |
| | TGACCTGGGTCCGCCAGGCTCCAGG | | ACTTAGTCTGGTACCAGCAGAAAC | |
| | GAAAGGGCTGGAGTGGGTGGCCAC | | CTGGCCAGGCTCCCAGGCTCCTCAT | |
| | CATAAAGAAGGATGGAGGGGAGCA | | CTATGGTGCATCCACCAGGGCCAC | |
| | GTACTATGTGGACTCTGTGAAGGGC | | TGGCATCCCAGACAGGTTCAGTGG | |
| | CGATTCACCATCTCCAGAGACAACG | | CAGTGGGTCTGGGACAGACTTCAC | |
| | CCAGGAATTCACTGTATCTACAAAT | | TCTCACCATCAGCAGACTGGAGCC | |
| | AAACAGCCTGAGGGCCGAGGATAC | | TGAAGATTTTGCAGTGTATTACTGT | |
| | GGCTGTCTATTACTGTGCGAGGGGT | | CAGCAGTATGGTAGCTCACCGTGG | |
| | GGATCTAGCAGCAGCTACTACTGGA | | ACGTTCGGCCAAGGGACCACGGTG | |
| | TCTACTGGGGCCAGGGAACCCTGGT | | GAAATCAAACGAACTGTGGCTGCA | |
| | CACCGTCTCCTCAGGGAGTGCATCC | | CCATCTGTCTTCATCTTCCCGCCAT | |
| | GCCCCAACCCTTTTCCCCCTCGTCTC | | CTGATGAGCAGTTGAAATCTGGAA | |
| | CTGTGAGAATTCCCCGTCGGATACG | | CTGCCTCTGTTGTGTGCCTGCTGAA | |
| | AGCAGCGTG | | TAACTTCTATCCCAGAGAGGCCAA | |
| | | | AGTACAGTGGAAGGTGGATAACGC | |
| | | | CCTCCAATCGGGTAACTCCCAGGA | |
| | | | GAGTGTCACAGAGCAGGACAGCAA | |
| | | | GGACAGCACCTACAGCCTCAGCAG | |
| | | | CACCCTGACGCTGAGCAAAGCAGA | |
| | | | CTACGAGAA | |
| S144-1848 | GAGGTGCAGCTGGTGGAGTCTGGGG | 1695 | CAGTCTGTGCTGACTCAGCCACCCT | 1785 |
| | GAGGCCTGGTCAAGCCTGGGGGGTC | | CAGCGTCTGGGACCCCCGGGCAGA | |
| | CCTGAGACTCTCCTGTGCAGCCTCT | | GGGTCACCATCTCTTGTTCTGGAAG | |
| | GGATTCACCTTCAGTAGCTATAGCA | | CAGCTCCAACATCGAACATAATTA | |
| | TGAACTGGGTCCGCCAGGCTCCAGG | | TGTATTCTGGTACCAGCAACTCCCA | |
| | GAAGGGGCTGGAGTGGGTCTCGTCC | | GGAACGGCCCCCAAACTCCTCATC | |
| | ATTAGTAGTAGTAGTAGTTACATAT | | TATAGTAATAATCACCGGCCCTCA | |
| | ACTACGCAGACTCAGTGAAGGGCCG | | GGGGTCCCTGACCGATTCTCTGGCT | |
| | ATTCACCATCTCCAGAGACAACGCC | | CCAAGTCTGGCACCTCAGCCTCCCT | |
| | AAGAATTCACTGTATCTGCAACTGA | | GGCCATCAGTGGGCTCCGGTCCGA | |
| | ACAGCCTGAGAGCCGAGGACACGG | | GGATGAGGCTGATTATTACTGTGC | |
| | CTGTGTACTACTGTGCGAGAGATCG | | AGCATGGGATGCCAGCCTGAGTGG | |
| | GGACCAGTTGATATTCTCGGCCGCT | | TCCTGTGGTATTCGCCGGAGGGAC | |
| | TTTGATATCTGGGGCCAAGGGACAA | | CAAGCTGACCGTCCTAGGTCAGCC | |
| | TGGTCACCGTCTCTTCAGCCTCCACC | | CAAGGCTGCCCCCTCGGTCACTCTG | |
| | AAGGGCCCATCGGTCTTCCCCCTGG | | TTCCCGCCCTCCTCTGAGGAGCTTC | |
| | CACCCTCCTCCAAGAGCACCTCTGG | | AAGCCAACAAGGCCACACTGGTGT | |
| | GGGCACAGCGGCCCTGGGCTGCCTG | | GTCTCATAAGTGACTTCTACCCGGG | |
| | GTCAAGGACTACTTCCCCGAACCGG | | AGCCGTGACAGTGGCCTGGAAGGC | |
| | TGACGGTGTCGTGGAACTCAGGCGC | | AGATAGCAGCCCCGTCAAGGCGGG | |
| | CCTGACCAGCGGCGTGCACACCTTC | | AGTGGAGACCACCACACCCTCCAA | |
| | CCGGCTGTCCTACAGTCCTCAGGA | | ACAAAGCAACAACAAGTACGCGGC | |
| | | | CAGCAGCTA | |
| S144-1850 | GAGGTGCAGCTGGTGGAGTCTGGGG | 1696 | GACATCCAGATGACCCAGTCTCCTT | 1786 |
| | GAGGCTTGGTACAGCCTGGGGGGTC | | CCACCCTGTCTGCATCTGTAGGAG | |
| | CCTGAGACTCTCCTGTGCAGCCTCT | | ACAGAGTCACCATCACTTGCCGGG | |
| | GGATTCACCTTTAGCAGCTATGCCA | | CCAGTCAGAGTATTACTAGCTGGTT | |
| | TGAGTTGGGTCCGCCAGGCTCCAGG | | GGCCTGGTATCAGCAGAAACCAGG | |
| | GAAGGGGCTGGAGTGGGTCTCAGCT | | GAAAGCCCCTAAGCTCCTGATCTA | |
| | ATTAGTGGTAGTGGTGGTAGCACAT | | TGATGCCTCCAATTTGGAAAGTGG | |
| | ACTACGCAGACTCCGTGAAGGGCCG | | GGTCCCATCAAGGTTCAGCGGCAG | |
| | GTTCACCATCTCCAGAGCCAATTCC | | TGGATCTGGGACAGAATTCACTCT | |
| | AAGAACACGCTGTATCTGCAAATGA | | CACCATCAGCAGCCTGCAGCCTGA | |
| | ACAGCCTGAGAGCCGAGGACACGG | | TGATTTTGCAACTTATTACTGCCAA | |
| | CCGTATATTACTGTGCGAAAGGCCC | | CAGTATAATAATTATCTGGGGACG | |
| | GCGCTTTAGTCGCGACTACTTTGAC | | TTCGGCCAAGGGACCAAGGTGGAA | |
| | TACTGGGGCCAGGGAACCCTGGTCA | | ATCAAACGAACTGTGGCTGCACCA | |
| | CCGTCTCCTCAGCCTCCACCAAGGG | | TCTGTCTTCATCTTCCCGCCATCTG | |
| | CCCATCGGTCTTCCCCCTGGCACCCT | | ATGAGCAGTTGAAATCTGGAACTG | |
| | CCTCCAAGAGCACCTCTGGGGGCAC | | CCTCTGTTGTGTGCCTGCTGAATAA | |
| | AGCGGCCCTGGGCTGCCTGGTCAAG | | CTTCTATCCCAGAGAGGCCAAAGT | |
| | GACTACTTCCCCGAACCGGTGACGG | | ACAGTGGAAGGTGGATAACGCCCT | |
| | TGTCGTGGAACTCAGGCGCCCTGAC | | CCAATCGGGTAACTCCCAGGAGAG | |
| | CAGCGGCGTGCACACCTTCCCGGCT | | TGTCACAGAGCAGGACAGCAAGGA | |
| | GTCCTACAGTCCTCAGGA | | CAGCACCTACAGCCTCAGCAGCAC | |
| | | | CCTGACGCTGAGCAAAGCAGACTA | |
| | | | CGAGAA | |
| S144-2234 | CAGGTCCAGCTGGTGCAATCTGGGG | 1697 | GACATCGTGATGACCCAGTCTCCA | 1787 |
| | CTGAGGTGAAGAAGCCTGGGTCCTC | | GACTCCCTGACTGTGTCTCTGGGCG | |
| | GGTGAAGGTCTCCTGCAAGGCTTCT | | AGAGGGCCACCATCAACTGCAAGT | |
| | GGAGGCACCTTCAGCAGATATACTA | | CCAGCCAGAGTGTTTTATACAGCTC | |
| | TCAGCTGGGTGCGACAGGCCCCTGG | | CAACAATAAGAACTACTTAGCTTG | |
| | ACAAGGGCTTGAGTGGATGGGAAG | | GTACCAGCAGAAACCAGGACAGCC | |
| | GATCATCCCTATACTTGGTACAGCA | | TCCTAAGCTGCTCATTTACTGGGCA | |
| | AACTACGCACAGAATTTCCAGGGCA | | TCTACCCGGGAATCCGGGGTCCCT | |
| | GAGTCACGATTACCGCGGACAAATC | | GACCGATTCAGTGGCAGCGGCTCT | |
| | CACGAGCACAGCCTACATGGAGCTG | | GGGACAGATTTCACTCTCACCGTC | |
| | AGTAGCCTGAGATCTGAGGACACGG | | AGCAGCCTGCAGGCTGAAGATGTG | |
| | CCGTGTATTACTGTGCGAGACACGG | | GCAGTTTATTACTGTCAGCAATATT | |
| | ATACAGCTATGGTCCCTTTGACTAC | | ATAGTACTCCTGGAACGTTCGGCC | |
| | TGGGGCCAGGGAACCCTGGTCACCG | | AAGGGACCAAGGTGGAAATCAAAC | |
| | TCTCCTCAGCCTCCACCAAGGGCCC | | GAACTGTGGCTGCACCATCTGTCTT | |
| | ATCGGTCTTCCCCCTGGCACCCTCCT | | CATCTTCCCGCCATCTGATGAGCAG | |
| | CCAAGAGCACCTCTGGGGGCACAGC | | TTGAAATCTGGAACTGCCTCTGTTG | |
| | GGCCCTGGGCTGCCTGGTCAAGGAC | | TGTGCCTGCTGAATAACTTCTATCC | |
| | TACTTCCCCGAACCGGTGACGGTGT | | CAGAGAGGCCAAAGTACAGTGGAA | |
| | CGTGGAACTCAGGCGCCCTGACCAG | | GGTGGATAACGCCCTCCAATCGGG | |
| | CGGCGTGCACACCTTCCCGGCTGTC | | TAACTCCCAGGAGAGTGTCACAGA | |
| | CTACAGTCCTCAGGAG | | GCAGGACAGCAAGGACAGCACCTA | |
| | | | CAGCCTCAGCAGCACCCTGACGCT | |
| | | | GAGCAAAGCAGACTACGAGAA | |
| S564-105 | CAGGTGCGGCTGCAGGAGTCGGGCC | 1698 | CAGTCTGCCCTGACTCAGCCTGCCT | 1788 |
| | CAGGACTGGTGAAGCCTTCACAGAC | | CCGTGTCTGGGTCTCCTGGACAGTC | |
| | CCTGTCCCTCACCTGCACTGTCTCTG | | GATCACCATCTCCTGCACTGGAAC | |
| | GTGGCTCCATCAGCAGTGGTAGTTA | | CAGCAGTGACGTTGGTGCTTATAA | |
| | CTACTGGAGCTGGATCCGGCAGCCC | | CTATGTCTCCTGGTACCAACAGCAC | |
| | GCCGGGAAGGGACTGGAGTGGATT | | CCAGGCAAAGCCCCCAAACTCATG | |
| | GGGCGTTTCCATACCAGTGGGAGCA | | ATTTATGAGGTCAGTAATCGGCCCT | |
| | CCAACTACAATCCCTCCCTCAAGAG | | CAGGGGTTTCTAATCGCTTCTCTGG | |
| | TCGAGTCACCATATCAGTAGACACG | | CTCCAAGTCTGGCAACACGGCCTC | |
| | TCCAAGAACCAGTTCTCCCTGAAGC | | CCTGACCATCTCTGGGCTCCAGGCT | |
| | TGAGTTCTGTGACCGCCGCAGACAC | | GAGGACGAGGCTGATTATTACTGC | |
| | GGCCGTGTATTACTGTGCGAGAGAT | | AGCTCATATACAAGCAGCACCTTC | |
| | TTAAAGGGAAAGACGTGGATACAG | | TTCGGAACTGGGACCACGGTCACC | |
| | ACCCCCTTTGACTACTGGGGCCAGG | | GTCCTAGGTCAGCCCAAGGCCAAC | |
| | GAATCCTGGTCACCGTCTCCTCAGC | | CCCACTGTCACTCTGTTCCCGCCCT | |
| | CTCCACCAAGGGCCCATCTGTCTTC | | CCTCTGAGGAGCTCCAAGCCAACA | |
| | CCCCTGGCACCCTCCTCCAAGAGCA | | AGGCCACACTAGTGTGTCTGATCA | |
| | CCTCTGGGGGCACAGCGGCCCTGGG | | GTGACTTCTACCCGGGAGCTGTGA | |
| | CTGCCTGGTCAAGGACTACTTCCCC | | CAGTGGCCTGGAAGGCAGATGGCA | |
| | GAACCGGTGACGGTGTCGTGGAACT | | GCCCCGTCAAGGCGGGAGTGGAGA | |
| | CAGGCGCTCTGACCAGCGGCGTGCA | | CCACCACACCCTCCAAACAAAGCA | |
| | CACCTTCCCGGCTGTCCTACAGTCCT | | ACAACAAGTACGCGGCCAGCAGCT | |
| | CAGGA | | AC | |
| S564- | GAGGTGCAGCTGGTGGAGTCTGGGG | 1699 | TCCTATGTGCTGACTCAGCCACCCT | 1789 |
| 14 | GAGGCTTGGTCCAGCCTGGGGGGTC | | CAGTGTCAGTGGCCCCAGGAAAGA | |
| | CCTGAGACTCTCCTGTGCAGCCTCT | | CGGCCAGGATTACCTGTGGGGGAA | |
| | GGACTCACCTTTAGTAGCTATTGGA | | ACAACATTGGAAGTAAAAGTGTGC | |
| | TGAGCTGGGCCCGCCAGGCTCCAGG | | ACTGGTACCAGCAGAGGCCAGGCC | |
| | GAAGGGGCTGGAGTGGGTGGCCAA | | AGGCCCCTGTACTGGTCATCTATTA | |
| | TATAAAGAAAGATGGAAGTGAGAA | | TGATAGCGACCGGCCCTCAGGGAT | |
| | ATACTATGTGGACTCTGTGAAGGGC | | CCCTGAGCGATTCTCTGGCTCCAAC | |
| | CGATTCACCATCTCCAGAGACAACG | | TCTGGGAACACGGCCACCCTGACC | |
| | CCAAGAACTCACTGTATCTGCAAAT | | ATCAGCAGGGTCGAGGCCGGGGAT | |
| | GAACAGCCTGAGAGTCGAGGACAC | | GAGGCCGACTATTACTGTCAGGTG | |
| | GGCTGTGTATTACTGTGCGAGTGAA | | TGGGATAGTAGTAGTGATCACCAT | |
| | CCTCCCCACTACGGTGGTAACTCCG | | TATGTCTTCGGAACTGGGACCAAG | |
| | GGGCTGAATACTTCCAGCACTGGGG | | GTCACCGTCCTAGGTCAGCCCAAG | |
| | CCAGGGCACCCTGGTCACCGTCTCC | | GCCAACCCCACTGTCACTCTGTTCC | |
| | TCAGCACCCACCAAGGCTCCGGATG | | CGCCCTCCTCTGAGGAGCTTCAAG | |
| | TGTTCCCCATCATATCAGGGTGCAG | | CCAACAAGGCCACACTGGTGTGTC | |
| | ACACCCAAAGGATAACAGCCCTGTG | | TCATAAGTGACTTCTACCCGGGAG | |
| | GTCCTGGCATGCTTGATAACTGGGT | | CCGTGACAGTGGCCTGGAAGGCAG | |
| | ACCACCC | | ATAGCAGCCCCGTCAAGGCGGGAG | |
| | | | TGGAGACCACCAAACCCTCCAAAC | |
| | | | AGAGCAACAACAAGTACGCGGCCA | |
| | | | GCAGCTA | |
| S564-68 | CAGGTGCAGCTGGTGCAGTCTGGGG | 1700 | CAGTCTGCCCTGACTCAGCCTCCCT | 1790 |
| | CTGAGGTGAAGAAGCCTGGGGCCTC | | CCGCGTCCGGGTCTCCTGGACAGT | |
| | AGTGAAGGTCTCCTGCAAGGCTTCT | | CAGTCACCATCTCCTGCACTGGAA | |
| | GGATACATCTTCACCGGCTATTATA | | CCAGCAGTGACGTTGGTGGTTATA | |
| | TGCACTGGGTGCGACAGGCCCCTGG | | ACTATGTCTCCTGGTACCAACAGC | |
| | ACAAGGGCTTGAGTGGATGGGATG | | ACCCAGGCAAAGCCCCCAAACTCA | |
| | GATCAACCCTAACAGTGGTGGCACT | | TGATTTATGAGGTCAGTAAGCGGC | |
| | AACTATGCACAGAAGTTTCAGGGCA | | CCTCAGGGGTCCCTGATCGCTTCTC | |
| | GGGTCACCATGACCAGGGACACGTC | | TGGCTCCAAGTCTGGCAACACGGC | |
| | CATCACCACAGCCTACATGGAGCTG | | CTCCCTGACCGTCTCTGGGCTCCAG | |
| | AGCAGGCTGAGATCTGACGACACG | | GCTGAGGATGAGGCTGATTATTTCT | |
| | GCCTTTTATTACTGTGCGAGAGTCA | | GCAGCTCATATGCAGACAGCAACA | |
| | AGAGGTTTTCGATTTTTGGAGTGGA | | ATTTGGTATTCGGCGGAGGGACCA | |
| | GCTTGACTACTGGGGCCAGGGAACC | | AGCTGACCGTCCTAGGTCAGCCCA | |
| | CTGGTCACCGTCTCCTCAGCCTCCA | | AGGCTGCCCCCTCGGTCACTCTGTT | |
| | CCAAGGGCCCATCGGTCTTCCCCCT | | CCCGCCCTCCTCTGAGGAGCTTCAA | |
| | GGCACCCTCCTCCAAGAGCACCTCT | | GCCAACAAGGCCACACTGGTGTGT | |
| | GGGGGCACAGCGGCCCTGGGCTGCC | | CTCATAAGTGACTTCTGCCCGGGA | |
| | TGGTCAAGGACTACTTCCCCGAACC | | GCCGTGACAGTGGCCTGGAAGGCA | |
| | GGTGACGGTGTCGTGGAACTCAGGC | | GATAGCAGCCCCGTCAAGGCGGGA | |
| | GCCCTGACCAGCGGCGTGCACACCT | | GTGGAGACCACCACACCCTCCAAA | |
| | TCCCGGCTGTCCTACAGTCCTCAGG | | CAAAGCAACAACAAGTACGCGGCC | |
| | A | | AGCAGCTACC | |
| S564-98 | CAGGTGCAGCTGCAGGAGTCGGGCC | 1701 | GACATCCAGATGACCCAGTCTCCA | 1791 |
| | CAGGACTGGTGAAGCCTTCGGAGAC | | TCCTCCCTGTCTGCATCTGTAGGAG | |
| | CCTGTCCCTCACCTGCACTGTCTCTG | | ACAGAGTCACCATCACTTGCCGGG | |
| | GTGGCTCCATCAGTAGTTACTACTG | | CAAGTCAGAGCATTCGCAGCTATT | |
| | GAGCTGGATCCGGCAGCCCCCAGGG | | TAAATTGGTATCAGCAGAAACCAG | |
| | AAGGGACTGGAGTGGATTGGGTATA | | GGAAAGCCCCTAAGCTCCTGATCT | |
| | TCTATTACAGTGGGAGCACCAACTA | | ATGCTGCATCCAGTTTGCAAAGTG | |
| | CAACCCCTCCCTCAAGAGTCGAGTC | | GCGTCCCATCAAGGTTCAGTGGCA | |
| | ACCATATCAGTAGACACGTCCAAGA | | GTGGATCTGGGACAGATTTCACTCT | |
| | ACCAGTTCTCCCTGAAGCTGAGCTC | | CACCATCGGCAGTCTGCAACCTGA | |
| | TGTGACCGCCGCAGACACGGCCGTG | | AGATTTTGCAACTTACTACTGTCAA | |
| | TATTACTGTGCGAGACATCAATCGC | | CAGAGTTACAGTACCTCCGTGGCG | |
| | GGTGGAATATAGTGGCTACGATGGA | | TTCGGCCAAGGGACCAAGGTGGAA | |
| | CTTTGACTACTGGGGCCAGGGAACC | | ATCAAACGAACTGTGGCTGCACCA | |
| | CTGGTCACCGTCTCCTCAGCCTCCA | | TCTGTCTTCATCTTCCCGCCATCTG | |
| | CCAAGGGCCCATCGGTCTTCCCCCT | | ATGAGCAGTTGAAATCTGGAACTG | |
| | GG | | CCTCTGTTGTGTGCCTGCTGAATAA | |
| | | | CTTCTATCCCAGAGAGGCCAAAGT | |
| | | | ACAGTGGAAGGTGGATAACGCCCT | |
| | | | CCAATCGGGTAACTCCCAGGAGAG | |
| | | | TGTCACAGAGCAGGACAGCAAGGA | |
| | | | CAGCACCTACAGCCTCAGCAGCAC | |
| | | | CCTGACGCTGAGCAAAGCAGACTA | |
| | | | CGAGA | |
| S564-105 | CAGGTGCGGCTGCAGGAGTCGGGCC | 1702 | CAGTCTGCCCTGACTCAGCCTGCCT | 1792 |
| | CAGGACTGGTGAAGCCTTCACAGAC | | CCGTGTCTGGGTCTCCTGGACAGTC | |
| | CCTGTCCCTCACCTGCACTGTCTCTG | | GATCACCATCTCCTGCACTGGAAC | |
| | GTGGCTCCATCAGCAGTGGTAGTTA | | CAGCAGTGACGTTGGTGCTTATAA | |
| | CTACTGGAGCTGGATCCGGCAGCCC | | CTATGTCTCCTGGTACCAACAGCAC | |
| | GCCGGGAAGGGACTGGAGTGGATT | | CCAGGCAAAGCCCCCAAACTCATG | |
| | GGGCGTTTCCATACCAGTGGGAGCA | | ATTTATGAGGTCAGTAATCGGCCCT | |
| | CCAACTACAATCCCTCCCTCAAGAG | | CAGGGGTTTCTAATCGCTTCTCTGG | |
| | TCGAGTCACCATATCAGTAGACACG | | CTCCAAGTCTGGCAACACGGCCTC | |
| | TCCAAGAACCAGTTCTCCCTGAAGC | | CCTGACCATCTCTGGGCTCCAGGCT | |
| | TGAGTTCTGTGACCGCCGCAGACAC | | GAGGACGAGGCTGATTATTACTGC | |
| | GGCCGTGTATTACTGTGCGAGAGAT | | AGCTCATATACAAGCAGCACCTTC | |
| | TTAAAGGGAAAGACGTGGATACAG | | TTCGGAACTGGGACCACGGTCACC | |
| | ACCCCCTTTGACTACTGGGGCCAGG | | GTCCTAGGTCAGCCCAAGGCCAAC | |
| | GAATCCTGGTCACCGTCTCCTCAGC | | CCCACTGTCACTCTGTTCCCGCCCT | |
| | CTCCACCAAGGGCCCATCTGTCTTC | | CCTCTGAGGAGCTCCAAGCCAACA | |
| | CCCCTGGCACCCTCCTCCAAGAGCA | | AGGCCACACTAGTGTGTCTGATCA | |
| | CCTCTGGGGGCACAGCGGCCCTGGG | | GTGACTTCTACCCGGGAGCTGTGA | |
| | CTGCCTGGTCAAGGACTACTTCCCC | | CAGTGGCCTGGAAGGCAGATGGCA | |
| | GAACCGGTGACGGTGTCGTGGAACT | | GCCCCGTCAAGGCGGGAGTGGAGA | |
| | CAGGCGCTCTGACCAGCGGCGTGCA | | CCACCACACCCTCCAAACAAAGCA | |
| | CACCTTCCCGGCTGTCCTACAGTCCT | | ACAACAAGTACGCGGCCAGCAGCT | |
| | CAGGA | | AC | |
| S564- | CAGGTGCAGCTGGTGCAGTCTGGGG | 1703 | CAGTCTGCCCTGACTCAACCTCCCT | 1793 |
| 134 | CTGAGGTGAAGAAGCCTGGGGCCTC | | CCGCGTCCGGGTCTCCTGGACAGT | |
| | AGTGAAGGTCTCCTGCAAGGCTTCT | | CAGTCACCATCTCCTGCACTGGAA | |
| | GGATACACCTTCACCGGCTACTATA | | CCAGCAGTGACGTTGGTGGTTATA | |
| | TGCACTGGGTGCGACAGGCCCCTGG | | ACTATGTCTCCTGGTACCAGCAAC | |
| | ACAAGGGCTTGAGTGGATGGGATG | | ACCCAGGCAAAGCCCCCAAACTCA | |
| | GATCAACCCTAACAGTGGTGGCACA | | TGATTTATGAGGTCAATAAGCGGC | |
| | AACTATGCACAGAAGTTTCAGGGCA | | CCTCAGGGGTCCCTGATCGCTTCTC | |
| | GGGTCACCATGACCAGGGACACGTC | | TGGCTCCAAGTCTGGCAACACGGC | |
| | CATCAACACAGCCTACATGGAGCTG | | CTCCCTGACCGTCTCTGGGCTCCAG | |
| | AGCAGGCTGAGATCTGACGACACG | | GCTGACGATGAGGCTGATTATTAC | |
| | GCCGTGTATTACTGTACGAGAGTCG | | TGCAGCTCATATGCAGGCAGCAAC | |
| | GGAGGTTTTCGATTTTTGGAGTGGA | | AATTTGGTTTTCGGCGGAGGGACC | |
| | GCTTGACTACTGGGGCCAGGGAACC | | AAGCTGACCGTCCTAGGTCAGCCC | |
| | CTGGTCACCGTCTCCTCAGCCTCCA | | AAGGCTGCCCCCTCGGTCACTCTGT | |
| | CCAAGGGCCCATCTGTCTTCCCCCT | | TCCCGCCCTCCTCTGAGGAGCTTCA | |
| | GGCACCCTCCTCCAAGAGCACCTCT | | AGCCAACAAGGCCACACTGGTGTG | |
| | GGGGGCACAGCGGCCCTGGGCTGCC | | TCTCATAAGTGACTTCTACCCGGGA | |
| | TGGTCAAGGACTACTTCCCCGAACC | | GCCGTGACAGTGGCCTGGAAGGCA | |
| | GGTGACGGTGTCGTGGAACTCAGGC | | GATAGCAGCCCCGTCAAGGCGGGA | |
| | GCCCTGACCAGCGGCGTGCACACCT | | GTGGAGACCACCACACCCTCCAAA | |
| | TCCCGGCTGTCCTACAGTCCTCAGG | | CAAAGCAACAACAAGTACGCGGCC | |
| | A | | AGCAGCTA | |
| S564-138 | CAGGTGCTCCTGGTGCAGTCTGGGG | 1704 | CAGTCTGCCCTGACTCAGCCTGCCT | 1794 |
| | CTGAGGTGAAGAAGCCTGGGGCCTC | | CCGTGTCTGGGTCTCCTGGACAGTC | |
| | AGTGAAGGTCTCCTGCAAGGCTTCT | | GATCACCATCTCCTGCACTGGAAC | |
| | GGATACACCTTCACCGGCTACTATC | | CAGCAGTGACGTTGGTGGTTATAA | |
| | TGCACTGGGTGCGACAGGCCCCTGG | | CTATGTCTCCTGGTACCAACAGCAC | |
| | ACAAGGGCTTGAGTGGATGGGATG | | CCAGGCAAAGCCCCCAAACTCATG | |
| | GATCAACCCTATCAGTGGTGGCACA | | ATTTATGAGGTCAGTAATCGGCCCT | |
| | AACTATGCACAGAATTTTCAGGACA | | CAGGGGTTTCTGATCGCTTCTCTGG | |
| | GGGTCACCATGACCAGGGACACGTC | | CTCCAAGTCTGGCAACACGGCCTC | |
| | CATCATCACAGCCTACATGGAACTG | | CCTGACCATCTCTGGGCTCCAGGCT | |
| | AGCAGGCTGAGATCTGACGACACG | | GAGGACGAGGCTGATTATTACTGC | |
| | GCCGTGTATTACTGTGCGAGACTTG | | AGCTCATATACAAGCAGCAGCACT | |
| | CCTATTATTATGATAGTAGTGCTTAC | | TATGTCTTCGGAACTGGGACCAAG | |
| | CGGGGTGCTTTTGATATCTGGGGCC | | GTCACCGTCCTAGGTCAGCCCAAG | |
| | AAGGGACAATGGTCACCGTCTCTTC | | GCCAACCCCACTGTCACTCTGTTCC | |
| | AGCCTCCACCAAGGGCCCATCTGTC | | CGCCCTCCTCTGAGGAGCTCCAAG | |
| | TTCCCCCTGGCACCCTCCTCCAAGA | | CCAACAAGGCCACACTAGTGTGTC | |
| | GCACCTCTGGGGGCACAGCGGCCCT | | TGATCAGTGACTTCTACCCGGGAG | |
| | GGGCTGCCTGGTCAAGGACTACTTC | | CTGTGACAGTGGCCTGGAAGGCAG | |
| | CCCGAACCGGTGACGGTGTCGTGGA | | ATGGCAGCCCCGTCAAGGCGGGAG | |
| | ACTCAGGCGCCCTGACCAGCGGCGT | | TGGAGACCACCAAACCCTCCAAAC | |
| | GCACACCTTCCCGGCTGTCCTACAG | | AGAGCAACAACAAGTACGCGGCCA | |
| | TCCTCAGG | | GCAGCTA | |
| S564-152 | CAGGTGCAGCTGGTGGAGTCTGGGG | 1705 | GACATCCAGATGACCCAGTCTCCA | 1795 |
| | GAGGCGTGGTCCAGCCTGGGAGGTC | | TCCTCCCTGTCTGCATCTGTAGGAG | |
| | CCTGAGACTCTCCTGTGCAGCGTCT | | ACAGAGTCACCATCACTTGCCAGG | |
| | GGATTCACCTTCAGTTACTATGGCA | | CGAGTCAGGACATTAACAACTATT | |
| | TGCACTGGGTCCGCCAGGCTCCAGG | | TAAATTGGTATCAGCAGAAACCAG | |
| | CAAGGGGCTGGAGTGGGTGGCAGTT | | GGAAAGCCCCTAAGCTCCTGATCT | |
| | ATATGGTATGATGGAAGTAATAAAC | | ACGATGCATCCAATTTGGAAACAG | |
| | ACTATGCAGACTCCGTGAAGGGCCG | | GGGTCCCATCAAGGTTCAGTGGGA | |
| | ATTCACCATCTCCAGAGACAATTCC | | GTGGATCTGGGACAGATTTTACTTT | |
| | AAGAACACGCTGTATCTGCAAATGA | | CACCATCAGCAGCCTGCAGCCTGA | |
| | ACAGCCTGAGAGCCGAGGACACGG | | AGATATTGCAACATATTACTGTCA | |
| | CTGTGTACTACTGTGCGAAAAATGC | | ACAGTATGACAATGTCCCTCCGCA | |
| | GGCCCCCTATTGTAGTGGTGGTAGC | | CACTTTTGGCCAGGGGACCAAGCT | |
| | TGCTACGGTACCTACTTTGACTACT | | GGAGATCAAACGAACTGTGGCTGC | |
| | GGGGCCAGGGAACCCTGGTCACCGT | | ACCATCTGTCTTCATCTTCCCGCCA | |
| | CTCCTCAGCCTCCACCAAGGGCCCA | | TCTGATGAGCAGTTGAAATCTGGA | |
| | TCTGTCTTCCCCCTGGCACCCTCCTC | | ACTGCCTCTGTTGTGTGCCTGCTGA | |
| | CAAGAGCACCTCTGGGGGCACAGC | | ATAACTTCTATCCCAGAGAGGCCA | |
| | GGCCCTGGGCTGCCTGGTCAAGGAC | | AAGTACAGTGGAAGGTGGATAACG | |
| | TACTTCCCCGAACCGGTGACGGTGT | | CCCTCCAATCGGGTAACTCCCAGG | |
| | CGTGGAACTCAGGCGCCCTGACCAG | | AGAGTGTCACAGAGCAGGACAGCA | |
| | CGGCGTGCACACCTTCCCGGCTGTC | | AGGACAGCACCTACAGCCTCAGCA | |
| | CTACAGTCCTCAGGA | | GCACCCTGACGCTGAGCAAAGCAG | |
| | | | ACTACGAGAA | |
| S564-218 | CAGGTCCAGCTGGTGCAGTCTGGGG | 1706 | CAGTCTGCCCTGACTCAGCCTCCCT | 1796 |
| | CTGAGGTGAAGAAGCCTGGGTCCTC | | CCGCGTCCGGGTCTCCTGGACAGT | |
| | GGTGAAGGTCTCCTGCAAGGCTTCT | | CAGTCACCATCTCCTGCACTGGAA | |
| | GGAGGCACCTTCAGCAGCTATGCTA | | CCAGCAGTGACGTTGGTGGTTATA | |
| | TCAGCTGGGTGCGACAGGCCCCTGG | | ACTATGTCTCCTGGTACCAACAGC | |
| | ACAAGGGCTTGAGTGGATGGGAGG | | ACCCAGGCAAAGCCCCCAAACTCA | |
| | GATCATCCCTATCTTTGGTACAGCA | | TGATTTATGAGGTCAGTAAGCGGC | |
| | AAGTACGCACAGAAGTTCCAGGGC | | CCTCAGGGGTCCCTGATCGCTTCTC | |
| | AGAGTCACGATTACCGCGGACGAAT | | TGGCTCCAAGTCTGGCAACACGGC | |
| | CCACGAGCACAGCCTACATGGAGCT | | CTCCCTGACCGTCTCTGGGCTCCAG | |
| | GAGCAGCCTGAGATCTGAGGACAC | | GCTGAGGATGAGGCTGATTATTAC | |
| | GGCCGTGTATTACTGTGCGAGAGGA | | TGCAGCTCATATGCAGGCAGCAAC | |
| | AAAGATGGCTACAATCCCTGGGGCG | | AATTTCGGGGTATTCGGCGGAGGG | |
| | CTTTTGATATCTGGGGCCAAGGGAC | | ACCAAGCTGACCGTCCTAGGTCAG | |
| | AATGGTCACCGTCTCTTCAGGGAGT | | CCCAAGGCTGCCCCCTCGGTCACTC | |
| | GCATCCGCCCCAACCCTTTTCCCCCT | | TGTTCCCGCCCTCCTCTGAGGAGCT | |
| | CGTCTCCTGTGAGAATTCCCCGTCG | | TCAAGCCAACAAGGCCACACTGGT | |
| | GATACGAGCAGCGTG | | GTGTCTCATAAGTGACTTCTACCCG | |
| | | | GGAGCCGTGACAGTGGCCTGGAAG | |
| | | | GCAGATAGCAGCCCCGTCAAGGCG | |
| | | | GGAGTGGAGACCACCACACCCTCC | |
| | | | AAACAAAGCAACAACAAGTACGCG | |
| | | | GCCAGCAGCTACCTGAGCCTGACG | |
| | | | CCTGAGCAGTGGAAGTCCCAC | |
| S564-249 | GAGGTGCAGCTGGTGGAGTCTGGGG | 1707 | CAGTCTGCCCTGACTCAGCCTGCCT | 1797 |
| | GAGGCTTGGTCCAGCCCGGGGGGTC | | CCGTGTCTGGGTCTCCTGGACAGTC | |
| | CCTGAGACTCTCCTGCGTAGCCTCT | | GATCACCATCTCCTGCACTGGAAC | |
| | GGATTCACCTTCAGTGACTATGCTA | | CAGCAGTGACATTGGTGGTTATAA | |
| | TGCACTGGGTCCGCCAGGCTCCAGG | | CTATGTCTCCTGGTACCAACAACAC | |
| | GAAGGGACTGGAATATATTGCAGCT | | CCAGGCAAAGCCCCCAAACTCATC | |
| | ATTAGTAGCAATGGGGGTAGGACAT | | ATTTCTGATGTCTCTAATCGGCCCT | |
| | ATTATGCAGACTCTGTGAAGGACAA | | CAGGGGTTTCTAGTCGCTTCTCTGG | |
| | ATTCACCATCTCCAGAGACAATTCC | | CTCCAAGTCTGGCAACACGGCCTC | |
| | AAGAACATCTTGTATCTTCACATGG | | CCTGACCATCTCTGGACTCCAGACT | |
| | GCAGCCTGAGAGCGGAGGACACGG | | GAGGACGAGGCTCATTATTATTGC | |
| | CTGTGTATTTCTGTGCGAGAGATCC | | AGCTCGTTTAGAAGTGGCATCACT | |
| | CCAGTCATGGGTGACTTCCACCACA | | CTCGGGGTATTCGGCGGGGGGACC | |
| | GCCCATTTCCAGCACTGGGGCCAGG | | AAGCTGACCGTCCTAGGTCAGCCC | |
| | GCACCCTGGTCACCGTCTCCTCAGC | | AAGGCTGCCCCCTCGGTCACTCTGT | |
| | ATCCCCGACCAGCCCCAAGGTCTTC | | TCCCGCCCTCCTCTGAGGAGCTTCA | |
| | CCGCTGAGCCTCTGCAGCACCCAGC | | AGCCAACAAGGCCACACTGGTGTG | |
| | CAGATGGGAACGTGGTCATCGCCTG | | TCTCATAAGTGACTTCTACCCGGGA | |
| | CCTGGTCCAGGGCTTCTTCCCCCAG | | GCCGTGACAGTGGCCTGGAAGGCA | |
| | GAGCCACTCAGTGTGACCTGGAGCG | | GATAGCAGCCCCGTCAAGGCGGGA | |
| | AAAGCGGACAGGGCGTGACCGCCA | | GTGGAGACCACCACACCCTCCAAA | |
| | GAAACTTCCC | | CAAAGCAACAACAAGTACGCGGCC | |
| | | | AGCAGCTA | |
| S564-265 | CAGGTGCAGCTGGTGCAGTCTGGGG | 1708 | CAGTCTGCCCTGACTCAGCCTCCCT | 1798 |
| | CTGAGGTGAAGAAGCCTGGGGCCTC | | CCGCGTCCGGGTCTCCTGGACAGT | |
| | AGTGAAGGTCTCCTGCAAGGCTTCT | | CAGTCACCATCTCCTGCACTGGAA | |
| | GGATACACCTTCACCGGCTACTATA | | CCAGCAGTGACGTTGGTGGTTATA | |
| | TGCACTGGGTGCGTCAGGCCCCTGG | | ACTTTGTCTCCTGGTACCAACAGCA | |
| | ACAAGGGCTTGAGTGGATGGGATG | | CCCAGGCAAAGCCCCCAAACTCAT | |
| | GATCAACCCTAACAGTGGTGCCATA | | GATTTATGAGGTCAGTAAGCGGCC | |
| | AACTATGCACAGAAGTTTCAGGGCA | | CTCAGGGGTCCCTGATCGCTTCTCT | |
| | GGGTCACCATGACCAGGGACACGTC | | GGCTCCAAGTCTGGCAACACGGCC | |
| | CATCAGCACAGCCTACATGGAGCTG | | TCCCTGACCGTCTCTGGGCTCCAGG | |
| | AGCAGCCTGAGATCTGACGACACGG | | CTGAGGATGAGGCTGATTATTACT | |
| | CCGTGTATTACTGTGCGAGAGTCGG | | GCAGCTCATATGGAGGCAGCAACA | |
| | GAGGTTTTCGATTTTTGGAGTGGAG | | ATTTGATATTCGGCGGAGGGACCA | |
| | CTTGATAACTGGGGCCAGGGAACCC | | GGCTGACCGTCCTAGGTCAGCCCA | |
| | TGGTCACCGTCTCCTCAGCCTCCAC | | AGGCTGCCCCCTCGGTCACTCTGTT | |
| | CAAGGGCCCATCTGTCTTCCCCCTG | | CCCGCCCTCCTCTGAGGAGCTTCAA | |
| | GCACCCTCCTCCAAGAGCACCTCTG | | GCCAACAAGGCCACACTGGTGTGT | |
| | GGGGCACAGCGGCCCTGGGCTGCCT | | CTCATAAGTGACTTCTACCCGGGA | |
| | GGTCAAGGACTACTTCCCCGAACCG | | GCCGTGACAGTGGCCTGGAAGGCA | |
| | GTGACGGTGTCGTGGAACTCAGGCG | | GATAGCAGCCCCGTCAAGGCGGGA | |
| | CCCTGACCAGCGGCGTGCACACCTT | | GTGGAGACCACCACACCCTCCAAA | |
| | CCCGGCTGTCCTACAGTCCTCAGGA | | CAAAGCAACAACAAGTACGCGGCC | |
| | | | AGCAGCTACCTGAGCCTGACGCCT | |
| | | | GAGCAGTGGAAGTCCCAC | |
| S564-275 | CAGGTGCAGCTGCAGGAGTCGGGCC | 1709 | GACATTCAGATGACCCAGTCTCCA | 1799 |
| | CAGGACTGGTGAAGCCTTCGGAGAC | | TCCTCCCTGTCTGCATCTATAGGAG | |
| | CCTGTCCCTCACCTGCACTGTCTCTG | | ACAGAGTCACCATCACTTGCCGGG | |
| | GTGGCTCCATCAGTAGTTACTACTG | | CAAGTCAGAGCATTAGCACCTATT | |
| | GAGCTGGATCCGGCAGCCCCCAGGG | | TAAATTGGTATCAGCAGAAACCAG | |
| | AAGGGACTGGAGTGGATTGGGTATA | | GGAAAGCCCCTAAACTCCTGATCT | |
| | TCTATTACAGTGGGAGCACCAAGTA | | ATGCTGCATCCAGTTTGCAAAGTG | |
| | CAACCCCTCCCTCAAGAGTCGAGTC | | GGGTCCCATCAAGGTTCAGTGGCA | |
| | ACCATATCAGTAGACACGTCCAAGA | | GTGGATCTGGGGCAGATTTCACTCT | |
| | AGCAGTTCTCCCTGAAGTTGAGCTC | | CACCATCAGCAGTCTGCAACCTGA | |
| | TGTGACCGCCGCAGACACGGCCGTG | | AGATTTTGCAACTTACTACTGTCAA | |
| | TATTACTGTGCGAGACATATAAAGA | | CAGAGTTACAGTACCCCGCTCACTT | |
| | TAGGAGTGGTCGGAGGCCTTACTTT | | TCGGCGGAGGGACGAAGGTGGAG | |
| | TGACTTCTGGGGCCAGGGAACCCTG | | ATCAAACGAACTGTGGCTGCACCA | |
| | GTCACCGTCTCCTCAGGGAGTGCAT | | TCTGTCTTCATCTTCCCGCCATCTG | |
| | CCGCCCCAACCCTTTTCCCCCTCGTC | | ATGAGCAGTTGAAATCTGGAACTG | |
| | TCCTGTGAGAATTCCCCGTCGGATA | | CCTCTGTTGTGTGCCTGCTGAATAA | |
| | CGAGCAGCGTG | | CTTCTATCCCAGAGAGGCCAAAGT | |
| | | | ACAGTGGAAGGTGGATAACGCC | |
| S564-287 | CAGGTGCAGCTGGTGCAGTCTGGGG | 1710 | CAGTCTGCCCTGACTCAGCCTGCCT | 1800 |
| | CTGAGGTGAAGAAGCCTGGGGCCTC | | CCGTGTCTGGGTCTCCTGGACAGTC | |
| | AGTGAAGGTCTCCTGCAAGGCTTCT | | GATCACCATCTCCTGCACTGGAAC | |
| | GGATACACCTTCACCGGCTACTATA | | CAGCAGTGACGTTGGTGGTTATAA | |
| | TGCACTGGGTGCGACAGGCCCCTGG | | CTATGTCTCCTGGTACCAACAACAC | |
| | ACAAGGGCTTGAGTGGATGGGATG | | CCAGGCAAAGCCCCCAAACTCATG | |
| | GATCAACCCTAACAGTGGTGGCACA | | ATTTATGATGTCAGTAATCGGCCCT | |
| | AACTATGCACAGAAGTTTCAGGGCA | | CAGGGGTTTCTAATCGCTTCTCTGG | |
| | GGGTCACCATGACCAGGGACACGTC | | CTCCAAGTCTGGCAACACGGCCTC | |
| | CATCAGCACAGCCTACATGGAGCTG | | CCTGACCATCTCTGGGCTCCAGGCT | |
| | AGCAGGCTGAGATGTGACGACACG | | GAGGACGAGGCTGATTATTACTGC | |
| | GCCGTGTATTACTGTGCGAGAGCCT | | AGCTCATATGCAAGCAGCAGCACT | |
| | CAACTCCGTATAGCAGTGGCTCCTG | | TGGGTGTTCGGCGGAGGGACCAAG | |
| | GGCGGACTACTGGGGCCAGGGAAC | | CTGACCGTCCTAGGTCAGCCCAAG | |
| | CCTGGTCACCGTCTCCTCAGGGAGT | | GCTGCCCCCTCGGTCACTCTGTTCC | |
| | GCATCCGCCCCAACCCTTTTCCCCCT | | CGCCCTCCTCTGAGGAGCTTCAAG | |
| | CGTCTCCTGTGAGAATTCCCCGTCG | | CCAACAAGGCCACACTGGTGTGTC | |
| | GATACGAGCAGCGTG | | TCATAAGTGACTTCTACCCGGGAG | |
| | | | CCGTGACAGTGGCCTGGAAGGCAG | |
| | | | ATAGCAGCCCCGTCAAGGCGGGAG | |
| | | | TGGAGACCACCACACCCTCCAAAC | |
| | | | AAAGCAACAACAAGTACGCGGCCA | |
| | | | GCAGCTATCTGAGCCTGACGCC | |
| S116-2822 | CAGGTGCAGCTGGTGGAGTCTGGGG | 2707 | GACATCCAGATGACCCAGTCTCCTT | 2756 |
| | GAGGCGTGGTCCAGCCTGGGAGGTC | | CCACCCTGTCTGCATCTGTAGGAG | |
| | CCTGAGACTCTCCTGTGCAGCCTCT | | ACAGAGTCACCATCACTTGCCGGG | |
| | GGATTCACCTTCAGTAGCTATGGCA | | CCAGTCAGAGTATTAGTAGCTGGT | |
| | TGCACTGGGTCCGCCAGGCTCCAGG | | TGGCCTGGTATCAGCAGAAACCAG | |
| | CAAGGGGCTGGAGTGGGTGGCAGTT | | GGAAAGCCCCTAAGCTCCTGATCT | |
| | ATATCATATGATGGAAGTAATAAAT | | ATGATGCCTCCAGTTTGGAAAGTG | |
| | ACTATGCAGACTCCGTGAAGGGCCG | | GGGTCCCATCAAGGTTCAGCGGCA | |
| | ATTCACCATCTCCAGAGACAATTCC | | GTGGATCTGGGACAGAATTCACTC | |
| | AAGAACACGCTGTATCTGCAAATGA | | TCACCATCAGCAGCCTGCAGCCTG | |
| | ACAGCCTGAGAGCTGAGGACACGG | | ATGATTTTGCAACTTATTACTGCCA | |
| | CTGTGTATTACTGTGCGAAAGGGGA | | ACAGTATAATAGTTATTCTCAAACT | |
| | TTACTATGGTTCGGGGAGTCAGTAC | | TTTGGCCAGGGGACCAAGCTGGAG | |
| | TACTTTGACTACTGGGGCCAGGGAA | | ATCAAACGAACTGTGGCTGCACCA | |
| | CCCTGGTCACCGTCTCCTCAGGGAG | | TCTGTCTTCATCTTCCCGCCATCTG | |
| | TGCATCCGCCCCAACCCTTTTCCCCC | | ATGAGCAGTTGAAATCTGGAACTG | |
| | TCGTCTCCTGTGAGAATTCCCCGTC | | CCTCTGTTGTGTGCCTGCTGAATAA | |
| | GGATACGAGCAGCGTG | | CTTCTATCCCAGAGAGGCCAAAGT | |
| | | | ACAGTGGAAGGTGGATAACGC | |
| S116-2825 | GAGGTGCAGCTGGTGGAGTCCGGG | 2708 | TCTTCTGAGCTGACTCAGGACCCTG | 2757 |
| | GGAGGCTTAGTTCAGCCTGGGGGGT | | CTGTGTCTGTGGCCTTGGGACAGA | |
| | CCCTGAGACTCTCCTGTGCAGCCTC | | CAGTCAGGATCACATGCCAAGGAG | |
| | TGGATTCACCTTCAGTAGCTACTGG | | ACAGCCTCAGAAGCTATTATGCAA | |
| | ATGCACTGGGTCCGCCAAGCTCCAG | | GCTGGTACCAGCAGAAGCCAGGAC | |
| | GGAAGGGGCTGGTGTGGGTCTCACG | | AGGCCCCTGTACTTGTCATCTATGG | |
| | TATTAATAGTGATGGGAGTAGCACA | | TAAAAACAACCGGCCCTCAGGGAT | |
| | AGCTACGCGGACTCCGTGAAGGGCC | | CCCAGACCGATTCTCTGGCTCCAGC | |
| | GATTCACCATCTCCAGAGACAACGC | | TCAGGAAACACAGCTTCCTTGACC | |
| | CAAGAACACGCTGTATCTGCAAATG | | ATCACTGGGGCTCAGGCGGAAGAT | |
| | AACAGTCTGAGAGCCGAGGACACG | | GAGGCTGACTATTACTGTAACTCCC | |
| | GCTGTGTATTACTGTGCAAGAGTCG | | GGGACAGCAGTGGTAACCTCGTGG | |
| | TTCTTACGTATTACTATGATAGTAGT | | TATTCGGCGGAGGGACCAAGCTGA | |
| | GGTTATCAGAATGCTTTTGATATCT | | CCGTCCTAGGTCAGCCCAAGGCTG | |
| | GGGGCCAAGGGACAATGGTCACCG | | CCCCCTCGGTCACTCTGTTCCCGCC | |
| | TCTCTTCAGGGAGTGCATCCGCCCC | | CTCCTCTGAGGAGCTTCAAGCCAA | |
| | AACCCTTTTCCCCCTCGTCTCCTGTG | | CAAGGCCACACTGGTGTGTCTCAT | |
| | AGAATTCCCCGTCGGATACGAGCAG | | AAGTGACTTCTACCCGGGAGCCGT | |
| | CGTG | | GACAGTGGCCTGGAAGGCAGATAG | |
| | | | CAGCCCCGTCAAGGCGGGAGTGGA | |
| | | | GACCACCAAACCCTCCAAACAGAG | |
| | | | CAACAACAAGTACGCGGCCAGCAG | |
| | | | CTA | |
| S116-3179 | CAGGTGCAGCTGCAGGAGTCGGGCC | 2709 | GACATCCAGATGACCCAGTCTCCA | 2758 |
| | CAGGACTGGTGAAGCCTTCGGAGAC | | TCTTCCGTGTCTGCATCTGTAGGAG | |
| | CCTGTCCCTCACCTGCACTGTCTCTG | | ACAGAGTCACCATCACTTGTCGGG | |
| | GTGGCTCCATCAGTAGTTACTACTG | | CGAGTCAGGGTATTAGCAGCTGGT | |
| | GAGCTGGATCCGGCAGCCCCCAGGG | | TAGCCTGGTATCAGCAGAAACCAG | |
| | AAGGGACTGGAGTGGATTGGGTATA | | GGAAAGCCCCTAAGCTCCTGATCT | |
| | TCTATTACAGTGGGAGCACCAACTA | | ATGCTGCATTCAGTTTGCAAAGTG | |
| | CAACCCCTCCCTCAAGAGTCGAGTC | | GGGTCCCATCAAGGTTCAGCGGCA | |
| | ACCATATCAGTAGACACGTCCAAGA | | GTGGATCTGGGACAGATTTCACTCT | |
| | ACCAGTTCTCCCTGAAGCTGACCTC | | CACCATCAGCAGCCTGCAGCCTGA | |
| | TGTGACCGCTGCGGACACGGCCGTG | | AGATTTTGCAACTTACTATTGTCAA | |
| | TATTACTGTGCGAGATGTGCCTTAC | | CAGGCTAACAGTTTCCCGCGGGGG | |
| | TACTAGGGAACGCTTTTGATATCTG | | CTCTCTTTCGGCGGAGGGACCAAG | |
| | GGGCCAAGGGACAATGGTCACCGTC | | GTGGAGATCAAACGAACTGTGGCT | |
| | TCTTCAGCTTCCACCAAGGGCCCAT | | GCACCATCTGTCTTCATCTTCCCGC | |
| | CGGTCTTCCCCCTGGCGCCCTGCTCC | | CATCTGATGAGCAGTTGAAATCTG | |
| | AGGAG | | GAACTGCCTCTGTTGTGTGCCTGCT | |
| | | | GAATAACTTCTATCCCAGAGAGGC | |
| | | | CAAAGTACAGTGGAAGGTGGATAA | |
| | | | CGC | |
| S144-121 | GAGGTGCACCTGTTGGAGTCTGGGG | 2710 | GAAATTGTGTTGACGCAGTCTCCA | 2759 |
| | GAGGCCTGGTACAGCCTGGGGGGTC | | GGCACCCTGTCGTTGTCTCCAGGA | |
| | CCTGAGACTCTCCTGTGCAGCCTCT | | GAAAGAGCCACCCTCTCCTGCAGG | |
| | GGATTCACCTTCAGCAGCTATGCCA | | GCCAGTCAGAGTGTTAGCAGCAGC | |
| | TGAGCTGGGTCCGCCAGACTCCAGG | | CACTTAGCCTGGTACCAGCAGAAA | |
| | GAAGGGGCTGGAGTGGATCTCAGCT | | CCTGGCCAGTCTCCCAGGCTCCTCA | |
| | ATTACTGCCAGTGGTTCTGACACAT | | TCTATGGTACATCCAACAGGGCCA | |
| | TCCACGCTGACTCCGTGAAGGGCCG | | CTGGCATCCCAGACAGGTTCAGTG | |
| | GTTCACCATCTCCAGAGACAATTCC | | GCAGTGGGTCTGGGACAGACTTCA | |
| | AAGGACACACTGTATCTGCAAATGA | | CTCTCAGCATCAGCAGACTGGAGC | |
| | ACAGCCTGAGAGTCGAGGACACGG | | CTGAAGATTTTGCAGTGTATTACTG | |
| | CCATATATTACTGTGCGAAAGGCTC | | TCAAGAATATGGTAGCTCACGGAT | |
| | TTCCACCGCCCGCCCCTACTACTTTG | | GTTCGGCCAAGGGACCAAGGTGGA | |
| | ACTACTGGGGCCAGGGAACCCTGGT | | AATCAAACGAACTGTGGCTGCACC | |
| | CACCGTCTCCTCAGGGAGTGCATCC | | ATCTGTCTTCATCTTCCCGCCATCT | |
| | GCCCCAACCCTTTTCCCCCTCGTCTC | | GATGAGCAGTTGAAATCTGGAACT | |
| | CTGTGAGAATTCCCCGTCGGATACG | | GCCTCTGTTGTGTGCCTGCTGAATA | |
| | AGCAGCGTG | | ACTTCTATCCCAGAGAGGCCAAAG | |
| | | | TACAGTGGAAGGTGGATAACGCCC | |
| | | | TCCAATCGGGTAACTCCCAGGAGA | |
| | | | GTGTCACAGAGCAGGACAGCAAGG | |
| | | | ACAGCACCTACAGCCTCAGCAGCA | |
| | | | CCCTGACGCTGAGCAAAGCAGACT | |
| | | | ACGAG | |
| S144-1364 | GAGGTGCAGCTGGTGCAGTCTGGAG | 2711 | GAAATTGTGTTGACGCAGTCTCCA | 2760 |
| | CAGAGATGAAAAAGCCCGGGGAGT | | GGCACCCTGTCTTTGTCTCCAGGGG | |
| | CTCTGAAGATCTCCTGTAAGGCTTC | | AAAGAGCCACCCTCTCCTGCAGGG | |
| | TGGATACTACTTTCCCAGCTACTGG | | CCAGTCAGGGTGTTAGCAGCAACT | |
| | ATCGCCTGGGTGCGCCAGATGCCCG | | ACTTAGCCTGGTACCAGCAGAAAC | |
| | GGAGAGGCCTGGAATGGATGGGGA | | CTGGCCAGGCTCCCAGGCTCCTCAT | |
| | TCATTTATCCTGTTGACTCTGAGACC | | CTATGGTGCATCCAGCAGGGCCAC | |
| | ACATACAGCCCGTCCTTCCAAGGCC | | TGGCATCCCAGACAGGTTCAGTGG | |
| | ACGTCACCATCTCAGCCGACAAGTC | | CAGTGGGTCTGGGACAGACTTCAC | |
| | CATCAGCACCGCCTACCTGCAGTGG | | TCTCACCATCAGCAGACTGGAGCC | |
| | AGCAGCCTGAAGGCCTCGGACACCG | | TGAAGATTTTGCAGTGTATTACTGT | |
| | CCATGTATTACTGTGCGAGACCGAA | | CAGCAGTATGGTACCACACCTAAT | |
| | TTACTATGGTTCGGGGAGCCCCCCG | | ACTTTCGGCGGAGGGACCAAGGTG | |
| | GGCTACTGGGGCCAGGGAACCCTGG | | GAGATCAAACGAACTGTGGCTGCA | |
| | TCACCGTCTCCTCAGGGAGTGCATC | | CCATCTGTCTTCATCTTCCCGCCAT | |
| | CGCCCCAACCCTTTTCCCCCTCGTCT | | CTGATGAGCAGTTGAAATCTGGAA | |
| | CCTGTGAGAATTCCCCGTCGGATAC | | CTGCCTCTGTTGTGTGCCTGCTGAA | |
| | GAGCAGCGTGGCCGTTGGCTG | | TAACTTCTATCCCAGAGAGGCCAA | |
| | | | AGTACAGTGGAAGGTGGATAACGC | |
| | | | CCTCCAATCGGGTAACTCCCAGGA | |
| | | | GAGTGTCACAGAGCAGGACAGCAA | |
| | | | GGACAGCACCTACAGCCTCAGCAG | |
| | | | CACCCTGACGCTGAGCAAAGCAGA | |
| | | | CTACGAGAA | |
| S144-292 | GAGGTGCAGCTGGTGCAGTCTGGAG | 2712 | GACATCCAGATGACCCAGTCTCCTT | 2761 |
| | CAGAGGTGAAAAAGCCCGGGGAGT | | CCACCCTGTCTGCATCTGTAGGAG | |
| | CTCTGAAGATCTCCTGTAAGGGTTC | | ACAGAGTCACCATCACTTGCCGGG | |
| | TGGATACACCTTTACCAACTACTGG | | CCAGTCAGAGTATTAGTAGCTGGT | |
| | ATCGGCTGGGTGCGCCAGATGCCCG | | TGGCCTGGTATCAGCAGAAACCAG | |
| | GGAAAGGCCTGGAGTGGATGGGGA | | GGAAAGCCCCTAACCTCCTGATCT | |
| | TCATCTATCCTGGTGACTCGGATAC | | ATGATGCCTCCAGTTTGGAAAGTG | |
| | CAGATACAGCCCGTCCTTCCAAGGC | | GGGTCCCATCAAGGTTCAGCGGCA | |
| | CAGGTCACCATCTCAGCCGACAAGT | | GTGGATCTGGGACAGAATTCACTC | |
| | CCATCAGCACCGCCTACCTGCAGTG | | TCACCATCAGCAGCCTGCAGCCTG | |
| | GAGCAGCCTGAAGGCCTCGGACACC | | ATGATTTTGCAACTTATTACTGCCA | |
| | GCCATGTATTACTGTGCGAGACTGT | | ACAGTATAATACTTACCCAAGGAC | |
| | TTTGTGGTGGTGACTGCCCGTTTGA | | GTTCGGCCAAGGGACCAAGGTGGA | |
| | CTACTGGGGCCAGGGAACCCTGGTC | | AATCAAACGAACTGTGGCTGCACC | |
| | ACCGTCTCCTCAGCCTCCACCAAGG | | ATCTGTCTTCATCTTCCCGCCATCT | |
| | GCCCATCGGTCTTCCCCCTGGCGCC | | GATGAGCAGTTGAAATCTGGAACT | |
| | CTGCTCCAGGAGCACCTCTGGGGGC | | GCCTCTGTTGTGTGCCTGCTGAATA | |
| | ACAGCGGCCCTGGGCTGCCTGGTCA | | ACTTCTATCCCAGAGAGGCCAAAG | |
| | AGGACTACTTCCCCGAACCGGTGAC | | TACAGTGGAAGGTGGATAACGCCC | |
| | GGTGTCGTGGAACTCAGGCGCCCTG | | TCCAATCGGGTAACTCCCAGGAGA | |
| | ACCAGCGGCGTGCACACCTTCCCGG | | GTGTCACAGAGCAGGACAGCAAGG | |
| | CTGTCCTACAGTCCTCAGGA | | ACAGCACCTACAGCCTCAGCAGCA | |
| | | | CCCTGACGCTGAGCAAAGCAGACT | |
| | | | ACGAGAA | |
| S155-37 | GAGGTGCAACTGTTGGAGTCTGGGG | 2713 | GAAATTGTGTTGACGCAGTCTCCA | 2762 |
| | GAGGCTTGGTGCAGCCGGGAGGGTC | | GGCACCCTGTCTTTGTCTCCAGGAG | |
| | CCTGAGACTCTCCTGCGCAGCCTCT | | AAAGAGCCACCCTCTCCTGCAGGG | |
| | GGATTCAGCTTTAGCAACTACGCCA | | CCAGTCAGACTGTTAGCAGCAACT | |
| | TGAGCTGGGTCCGCCAGGCTCCAGG | | ACTTAGCCTGGTACCAGCAGAAAC | |
| | GAAGGGGCTGGAGTGGGTCTCAGCT | | CTGCCCAGGGTCCCAGGCTCGTCA | |
| | GTTTCTGGTAATGGAGTTGGCACAT | | TCTATGGTGCATCCAACAGGGCCA | |
| | TCCACGCAGACTCCGTGAAGGGCCG | | CTGGCATCCCAGACAGGTTCAGTG | |
| | CTTCACCATCTCCAGAGACAATTCC | | GCAGTGGGTCTGGGACAGACTTCA | |
| | AAGGACACGTTCTATTTGCAAATGA | | CTCTCACCATCAGCAGACTGGAGC | |
| | GTGGCCTCACAGTCGACGACACGGC | | CTGAAGATTTTGCAGTGTATTACTG | |
| | CCTATATTATTGTGTGAAGGGAAGT | | TCAGCAGTATGGTAATTCAAGGAT | |
| | GCAGCCGCTCGCCCCTACTACTTTG | | TTTCGGCCAAGGGACCAAGGTGGA | |
| | ACTACTGGGGCCAGGGAATCCTGGT | | GATCAAACGAACTGTGGCTGCACC | |
| | CGCCGTCTCCTCAGGGAGTGCATCC | | ATCTGTCTTCATCTTCCCGCCATCT | |
| | GCCCCAACCCTTTTCCCCCTCGTCTC | | GATGAGCAGTTGAAATCTGGAACT | |
| | CTGTGAGAATTCCCCGTCGGATACG | | GCCTCTGTTGTGTGCCTGCTGAATA | |
| | AGCAGCGTG | | ACTTCTATCCCAGAGAGGCCAAAG | |
| | | | TACAGTGGAAGGTGGATAACGC | |
| S166-1318 | GAGGTGCAGCTGGTGGAGTCTGGGG | 2714 | TCCTATGAGCTGACTCAGCCACCCT | 2763 |
| | GAGGCTTGGTCCAGCCTGGGGGGTC | | CAGTGTCCGTGTCCCCAGGACAGA | |
| | CCTGAGACTCTCCTGTGCAGCCTCT | | CAGCCAGCATCACCTGCTCTGGAG | |
| | GGATTCACCTTTACTATCTATTGGAT | | ATAAATTGGGGGATAAATATGCTT | |
| | GAGCTGGGTCCGCCAGGCTCCAGGG | | GCTGGTATCAGCAGAAGCCAGGCC | |
| | AAGGGGCTGGAGTGGGTGGCCAAC | | AGTCCCCTGTGTTGGTCATCTATCA | |
| | ATAAAGCAAGATGGAAGTGAGAAA | | AGATAGCAAGCGGCCCTCAGGGAT | |
| | TACTATGTGGACTCTGTGAAGGGCC | | CCCTGAGCGATTCTCTGGCTCCAAC | |
| | GATTCACCATCTCCAGAGACAACGC | | TCTGGGAACACAGCCACTCTGACC | |
| | CAAGAATTCACTGTATCTGCAAATG | | ATCAGCGGGACCCAGGCTATGGAC | |
| | AACAGCCTGAGAGCCGAGGACACG | | GAGGCTGACTATTACTGTCAGGCG | |
| | GCCGTGTATTACTGTGCGAGAGATG | | TGGGACAGCAGCACCGTGGTATTC | |
| | GTATAGCAGTGGCTGGTGGGTTTGA | | GGCGGAGGGACCAAGCTGACCGTC | |
| | CTACTGGGGCCAGGGAACCCTGGTC | | CTAGGTCAGCCCAAGGCTGCCCCC | |
| | ACCGTCTCCTCAGGGAGTGCATCCG | | TCGGTCACTCTGTTCCCGCCCTCCT | |
| | CCCCAACCCTTTTCCCCCTCGTCTCC | | CTGAGGAGCTTCAAGCCAACAAGG | |
| | TGTGAGAATTCCCCGTCGGATACGA | | CCACACTGGTGTGTCTCATAAGTG | |
| | GCAGCGTG | | ACTTCTACCCGGGAGCCGTGACAG | |
| | | | TGGCCTGGAAGGCAGATAGCAGCC | |
| | | | CCGTCAAGGCGGGAGTGGAGACCA | |
| | | | CCACACCCTCCAAACAAAGCAACA | |
| | | | ACAAGTACGCGGCCAGCAGCTA | |
| S166-1366 | CAGATCACCTTGAAGGAGTCTGGTC | 2715 | TCCTATGAGCTGACTCAGCCACCCT | 2764 |
| | CTACGCTGGTGAAACCCACACAGAC | | CAGTGTCCGTGTCCCCAGGACAGA | |
| | CCTCACGCTGACCTGCACCTTCTCTG | | CAGCCAGCATCACCTGCTCTGGAG | |
| | GGTTCTCACTCAGCACTAGTGGAGT | | ATAAATTGGGGGATAAATATGCTT | |
| | GGGTGTGGGCTGGATCCGTCAGCCC | | GCTGGTATCAGCAGAAGCCAGGCC | |
| | CCAGGAAAGGCCCTGGAGTGGCTTG | | AGTCCCCTGTGCTGGTCATCTATCA | |
| | CACTCATTTATTGGGATGATGATAA | | AGATAGCAAGCGGCCCTCAGGGAT | |
| | GCGCTACAGGCCATCTCTGAAGAGC | | CCCTGAGCGATTCTCTGGCTCCAAC | |
| | AGGCTCAGCATCACCAAGGACACCT | | TCTGGGAACACAGCCACTCTGACC | |
| | CCAAAAACCAGGTGGTCCTTACAAT | | ATCAGCGGGACCCAGGCTATGGAT | |
| | GACCAACATGGACCCTGTGGACACA | | GAGGCTGACTATTACTGTCAGGCG | |
| | GCCACATATTACTGTGCACACCATC | | TGGGACAGCAGCACTAGGGATTAT | |
| | ACCCCATACTTGATTTTGACTACTG | | GTCTTCGGAACTGGGACCAAGGTC | |
| | GGGCCAGGGAACCCTGGTCACCGTC | | ACCGTCCTAGGTCAGCCCAAGGCC | |
| | TCCTCAGGGAGTGCATCCGCCCCAA | | AACCCCACTGTCACTCTGTTCCCGC | |
| | CCCTTTTCCCCCTCGTCTCCTGTGAG | | CCTCCTCTGAGGAGCTCCAAGCCA | |
| | AATTCCCCGTCGGATACGAGCAGCG | | ACAAGGCCACACTAGTGTGTCTGA | |
| | TG | | TCAGTGACTTCTACCCGGGAGCTGT | |
| | | | GACAGTGGCCTGGAAGGCAGATGG | |
| | | | CAGCCCCGTCAAGGCGGGAGTGGA | |
| | | | GACCACCAAACCCTCCAAACAGAG | |
| | | | CAACAACAAGTACGCGGCCAGCAG | |
| | | | CTA | |
| S166-2395 | CAGGTGCAGCTGCAGGAGTCGGGCC | 2716 | TCCTATGTGCTGACTCAGACACCCT | 2765 |
| | CAGGACTGGTGAAGCCTTCGGAGAC | | CGGTGTCAGTGGCCCCAGGACAGA | |
| | CCTGTCCCTCACCTGCACTGTCTCTG | | CGGCCAGGATTACCTGTGGGGGAA | |
| | GTGGCTCCATCAGTACTTACTACTG | | ACAACATTGGAAGTAAAAGTGTGC | |
| | GAGCTGGATCCGGCAGCCCGCCGGG | | ACTGGTACCAGCAGAAGCCAGGCC | |
| | AAGGGACTGGAGTGGATTGGGCGT | | AGGCCCCTGTGCTGGTCGTCCATG | |
| | ATCTATACCAGTGGGAGCACCAACT | | ATGAAAGCGACCGGCCCTCAGGGA | |
| | ACAACCCCTCCCTCAAGAGTCGGGT | | TCCCTGAGCGATTTTTTGGCTCCAA | |
| | CACCATGTCAGTAGACACGTCCAAG | | CTCTGGGAACACGGCCACCCTGAC | |
| | AACCAGTTCTCCCTGAAGCTGAGCT | | CATCAGCAGGGTCGAAGCCGGGGA | |
| | CTGTGACCGCCGCGGACACGGCCGT | | TGAGGCCGACTATTACTGTCAGGT | |
| | GTATTACTGTGCGAGAGAGGTTACT | | GTGGGATAGTAGTAGTGATCATCT | |
| | ATGATAGTACTGGGATACAACTGGT | | TCATGTCTTCGGAACTGGGACCAA | |
| | TCGACCCCTGGGGCCAGGGAACCCT | | GGTCACCGTCCTAGGTCAGCCCAA | |
| | GGTCACCGTCTCCTCTGCACCCACC | | GGCCAACCCCACTGTCACTCTGTTC | |
| | AAGGCTCCGGATGTGTTCCCCATCA | | CCGCCCTCCTCTGAGGAGCTCCAA | |
| | TATCAGGGTGCAGACACCCAAAGG | | GCCAACAAGGCCACACTAGTGTGT | |
| | ATAACAGCCCTGTGGTCCTGGCATG | | CTGATCAGTGACTTCTACCCGGGA | |
| | CTTGATAACTGGGTACCACC | | GCTGTGACAGTGGCCTGGAAGGCA | |
| | | | GATGGCAGCCCCGTCAAGGCGGGA | |
| | | | GTGGAGACCACCAAACCCTCCAAA | |
| | | | CAGAGCAACAACAAGTACGCGGCC | |
| | | | AGCAGCTA | |
| S166-2620 | GAGGTGCAGCTGGTGGAGTCTGGGG | 2717 | TCCTATGAGCTGACTCAGCCACCCT | 2766 |
| | GAGGCTTGGTCCAGCCTGGGGGGTC | | CAGTGTCCGTGTCCCCAGGACAGA | |
| | CCTGAGACTCTCCTGTGCAGCCTCT | | CAGCCAGCATCACCTGCTCTGGAG | |
| | GGATTCACCTTTAGTAGCTATTGGA | | ATAAATTGGGGGATAAATATGCTT | |
| | TGAGCTGGGTCCGCCAGGCTCCAGG | | GCTGGTATCAGCAGAAGCCAGGCC | |
| | GAAGGGGCTGGAGTGGGTGGCCAA | | AGTCCCCTGTGCTGGTCATCTATCA | |
| | CATAAAGCAAGATGGAAGTGAGAA | | AGATAGCAAGCGGCCCTCAGGGAT | |
| | ATACTATGTGGCCTCTGTGAAGGGC | | CCCTGAGCGATTCTCTGGCTCCAAC | |
| | CGATTCACCATCTCCAGAGACAACG | | TCTGGGAACACAGCCACTCTGACC | |
| | CCAAGAACTCACTGTATCTGCAAAT | | ATCAGCGGGACCCAGGCTATGGAT | |
| | GAACAGCCTGAGAGCCGAGGACAC | | GAGGCTGACTATTTCTGTCAGGCGT | |
| | GGCCGTGTATTACTGTGCGAGAGAT | | GGGACAGCAGCACTGTGGTATTCG | |
| | AGTATAGCAGTGGCTGGGGGCCTTG | | GCGGAGGGACCAAGCTGACCGTCC | |
| | ACTACTGGGGCCAGGGAACCCTGGT | | TACGTCAGCCCAAGGCTGCCCCCT | |
| | CACCGTCTCCTCAGGGAGTGCATCC | | CGGTCACTCTGTTCCCGCCCTCCTC | |
| | GCCCCAACCCTTTTCCCCCTCGTCTC | | TGAGGAGCTTCAAGCCAACAAGGC | |
| | CTGTGAGAATTCCCCGTCGGATACG | | CACACTGGTGTGTCTCATAAGTGA | |
| | AGCAGCGTG | | CTTCTACCCGGGAGCCGTGACAGT | |
| | | | GGCCTGGAAGGCAGATAGCAGCCC | |
| | | | CGTCAAGGCGGGAGTGGAGACCAC | |
| | | | CACACCCTCCAAACAAAGCAACAA | |
| | | | CAAGTACGCGGCCAGCAGCTA | |
| S166-32 | CAGGTGCAGCTGGTGGAGTCTGGGG | 2718 | GACATCCAGATGACCCAGTCTCCTT | 2767 |
| | GAGGCTTGGTCAAGCCTGGAGGGTC | | CCACCCTGTCTGCATCTGTAGGAG | |
| | CCTGAGACTCTCCTGTGCAGCCTCT | | ACAGAGTCACCATCACTTGCCGGG | |
| | GGATTCACCTTCAGTGACTACTACA | | CCAGTCAGAGTATTTTTAGCTGGTT | |
| | TGAGCTGGATCCGCCAGGCTCCAGG | | GGCCTGGTATCAGCAGAAACCAGG | |
| | GAAGGGGCTGGAGTGGGTTTCATAC | | GAAAGCCCCTAAGCTCCTGATCTA | |
| | ATTAGTATTAGTGATACGACCATAT | | TGATGCCTCCAGTTTGGAAAGTGG | |
| | ACTACGCAGACGCTGTGCAGGGCCG | | GGTCCCATCAAGGTTCAGCGGCAG | |
| | ATTCACCATGTCCAGGGACAACGCC | | TGGATCTGGGACAGAATTCACTCT | |
| | AAGAACTCACTGTATCTGCAAATGA | | CACCATCAGCAGCCTGCAGCCTGA | |
| | ACAGCCTGAAGGCCGAGGACACGG | | TGATTTTGCAACTTATTACTGCCAA | |
| | CCGTGTATTACTGTGCGAGAGCTAG | | CAGTATAATAGTTATTGGACGTTCG | |
| | CCCATATTGTGGTGGTGATTGCTCTT | | GCCAAGGGACCAAGGTGGAAATCA | |
| | TCGGCAATGCTTTTGATATCTGGGG | | AACGAACTGTGGCTGCACCATCTG | |
| | CCTAGGGACAATGGTCACCGTCTCT | | TCTTCATCTTCCCGCCATCTGATGA | |
| | TCAGCCTCCACCAAGGGCCCATCGG | | GCAGTTGAAATCTGGAACTGCCTC | |
| | TCTTCCCCCTGGCACCCTCCTCCAAG | | TGTTGTGTGCCTGCTGAATAACTTC | |
| | AGCACCTCTGGGGGCACAGCGGCCC | | TATCCCAGAGAGGCCAAAGTACAG | |
| | TGGGCTGCCTGGTCAAGGACTACTT | | TGGAAGGTGGATAACGCCCTCCAA | |
| | CCCCGAACCGGTGACGGTGTCGTGG | | TCGGGTAACTCCCAGGAGAGTGTC | |
| | AACTCAGGCGCCCTGACCAGCGGCG | | ACAGAGCAGGACAGCAAGGACAG | |
| | TGCACACCTTCCCGGCTGTCCTACA | | CACCTACAGCCTCAGCAGCACCCT | |
| | GTCCTCAGGA | | GACGCTGAGCAAAGCAGACTACGA | |
| | | | G | |
| S171-1150 | GAGGTGCAGCTGGTGGAGTCTGGGG | 2719 | TCCTATGAGCTGACTCAGCCACCCT | 2768 |
| | GAGGCTTGGTCCAGCCTGGGGGGTC | | CAGTGTCCGTGTCCCCAGGACAGA | |
| | CCTGAGACTCTCCTGTGCAGCCTCT | | CAGCCAGCATCACCTGCTCTGGAG | |
| | GGATTCACCTTTAGTAGCTATTGGA | | ATAAATTGGGGGATAAATATGCTT | |
| | TGAGCTGGGTCCGCCAGGCTCCAGG | | GCTGGTATCAGCAGAAGCCAGGCC | |
| | GAAGGGGCTGGAGTGGGTGGCCAA | | AGTCCCCTGTGCTGGTCATCTATCA | |
| | CATAAAGCAAGATGGAAGTGAGAA | | AGATAGCAAGCGGCCCTCAGGGAT | |
| | ATACTATGTGGACTCTGTGAAGGGC | | CCCTGAGCGATTCTCTGGCTCCAAC | |
| | CGATTCACCATCTCCAGAGACAACG | | TCTGGGAACACAGCCACTCTGACC | |
| | CCAAGAACTCACTGTATCTGCAAAT | | ATCAGCGGGACCCAGGCTATGGAT | |
| | GAACAGCCTGAGAGCCGAGGACAC | | GAGGCTGACTATTACTGTCAGGCG | |
| | GGCTGTGTATTACTGTGCGAGAGAC | | TGGGACAGCAGCACTGTGGTATTC | |
| | GGTATAGCAGTGGCTGGTGGGCTTG | | GGCGGAGGGACCAAGCTGACCGTC | |
| | ACTACTGGGGCCAGGGAACCCTGGT | | CTAGGTCAGCCCAAGGCTGCCCCC | |
| | CACCGTCTCCTCAGCACCCACCAAG | | TCGGTCACTCTGTTCCCGCCCTCCT | |
| | GCTCCGGATGTGTTCCCCATCATAT | | CTGAGGAGCTTCAAGCCAACAAGG | |
| | CAGGGTGCAGACACCCAAAGGATA | | CCACACTGGTGTGTCTCATAAGTG | |
| | ACAGCCCTGTGGTCCTGGCATGCTT | | ACTTCTACCCGGGAGCCGTGACAG | |
| | GATAACTGGGTACCACC | | TGGCCTGGAAGGCAGATAGCAGCC | |
| | | | CCGTCAAGGCGGGAGTGGAGACCA | |
| | | | CCACACCCTCCAAACAAAGCAACA | |
| | | | ACAAGTACGCGGCCAGCAGCTA | |
| S171-1285 | CAGGTGCAGTTGGTGGAGTCTGGGG | 2720 | TCCTATGAGCTGACACAGCCACCC | 2769 |
| | GAGGCGTGGTCCAGCCTGGGAGGTC | | TCGGTGTCAGTGTCCCCAGGACAA | |
| | CCTGAGACTCTCCTGTGCAGCCTCT | | ACGGCCAGGATCACCTGCTCTGGA | |
| | GGATTCATCTTCAGTAACAATGCTT | | GATGCACTGCCAAAAAAATTTGTT | |
| | TGCACTGGGTCCGCCAGGCTCCAGG | | CATTGGTACCAGCAGAAGTCAGGC | |
| | CAAGGGGCTGGAGTGGGTGGCAATT | | CAGGCCCCTGTGCTGGTCATCTATG | |
| | ATATCATATGATGGAAGCAATAAAA | | AGGACAGTAAACGACCCTCCGGGA | |
| | ATTATGCAGCCTCCGTGAAGGGCCG | | TCCCTGAGAGATTCTCTGGCTCCAG | |
| | ATTCACCATCTCCAGAGACAATTCC | | CTCAGGGACAACGGCCACCTTGAC | |
| | CAGAACACGGTGTTTCTGCAAATGA | | CATCAGTGGGGCCCAGGTGGAGGA | |
| | ACAGCCTGAGAGCTGAAGACACGG | | TGAAGGTGACTACTACTGTTATTCA | |
| | CTGTGTATTACTGTGCGAGAGATCA | | ACAGACAGTAGTGGCCGAGGGGTG | |
| | TATAGCAGGAGCTGCTAAGTATTTC | | TTCGGCGGAGGGACCAAGCTGACC | |
| | GACTACTGGGGCCAGGGAACCCTGG | | GTCCTAGGTCAGCCCAAGGCTGCC | |
| | TCACCGTCTCCTCAGCCTCCACCAA | | CCCTCGGTCACTCTGTTCCCACCCT | |
| | GGGCCCATCGGTCTTCCCCCTGGCA | | CCTCTGAGGAGCTTCAAGCCAACA | |
| | CCCTCCTCCAAGAGCACCTCTGGGG | | AGGCCACACTGGTGTGTCTCATAA | |
| | GCACAGCGGCCCTGGGCTGCCTGGT | | GTGACTTCTACCCGGGAGCCGTGA | |
| | CAAGGACTACTTCCCCGAACCGGTG | | CAGTGGCCTGGAAGGCAGATAGCA | |
| | ACGGTGTCGTGGAACTCAGGCGCCC | | GCCCCGTCAAGGCGGGAGTGGAGA | |
| | TGACCAGCGGCGTGCACACCTTCCC | | CCACCACACCCTCCAAACAAAGCA | |
| | GGCTGTCCTACAGTCCTCAGGA | | ACAACAAGTACGCGGCCAGCAGCT | |
| | | | A | |
| S171-692 | CAGGTGCAGCTGCAGGAGTCGGGCC | 2721 | GACATCCAGATGACCCAGTCTCCA | 2770 |
| | CAGGACTGGTGAAGCCTTCACAGAC | | TCCTCCCTGTCTGCATCTGTAGGAG | |
| | CCTGTCCCTCACCTGCACTGTCTCTG | | ACAGAGTCACCATCACTTGCCGGG | |
| | GTGGCTCCATCAGCAGTGGTAGTTA | | CAAGTCAGAGCATTAGCAGCTATT | |
| | CTACTGGAGCTGGATCCGGCAGCCC | | TAAATTGGTATCAGCAGAAACCAG | |
| | GCCGGGAAGGGACTGGAGTGGATT | | GGAAAGCCCCTAAGCTCCTGATCT | |
| | GGGCGTATCTATACCAGTGGGAGCA | | ATGCTGCATCCAGTTTGCAAAGTG | |
| | CCAACTACAACCCCTCCCTCAAGAG | | GGGTCCCATCAAGGTTCAGTGGCA | |
| | TCGAGTCACCATATCAGTAGACACG | | GTGGATCTGGGACAGATTTCACTCT | |
| | TCCAAGAACCAGTTCTCCCTGAAGC | | CACCATCAGCAGTCTGCAACCTGA | |
| | TGAGCTCTGTGACCGCCGCAGACAC | | AGATTTTGCAACTTACTACTGTCAA | |
| | GGCCGTGTATTACTGTGCGAGAGAG | | CAGAGTTACAGTAAGAACACTTTT | |
| | AGTAAGGTAACTATGGTTCGGGGAG | | GGCCAGGGGACCAAGCTGGAGATC | |
| | GTCTGGCCTACTACTACATGGACGT | | AAACGAACTGTGGCTGCACCATCT | |
| | CTGGGGCAAAGGGACCACGGTCAC | | GTCTTCATCTTCCCGCCATCTGATG | |
| | CGTCTCCTCAGCACCCACCAAGGCT | | AGCAGTTGAAATCTGGAACTGCCT | |
| | CCGGATGTGTTCCCCATCATATCAG | | CTGTTGTGTGCCTGCTGAATAACTT | |
| | GGTGCAGACACCCAAAGGATAACA | | CTATCCCAGAGAGGCCAAAGTACA | |
| | GCCCTGTGGTCCTGGCATGCTTGAT | | GTGGAAGGTGGATAACGC | |
| | AACTGGGTACCACC | | | |
| S179-122 | GAGGTGCAGCTGGTGGAGTCTGGGG | 2722 | AATTTTATGCTGACTCAGCCCCACT | 2771 |
| | GAGGCTTGGTCCAGCCTGGGGGGTC | | CTGTGTCGGAGTCTCCGGGGAAGA | |
| | CCTGAGACTCTCCTGTGCAGCCTCT | | CGGTAACCATCTCCTGCACCGGCA | |
| | GGATTCACCTTTAGTACCTATTGGA | | GCAGTGGCAGCATTGCCAGCAACT | |
| | TGAGCTGGGTCCGCCAGGCTCCAGG | | ATGTGCAGTGGTACCAGCAGCGCC | |
| | GAAGGGGCTGGAGTGGGTGGCCAA | | CGGGCAGTGCCCCCACCACTGTGA | |
| | CATAAAGCAAGATGGAAGTGAGAA | | TCTATGAGGATAACCAAAGACCCT | |
| | GTACTATGTGGACTCTGTGAAGGGC | | CTGGGGTCCCTGATCGGTTCTCTGG | |
| | CGATTCACCATCTCCAGAGACAACG | | CTCCATCGACAGCTCCTCCAACTCT | |
| | CCAAGAACTCACTGTATCTGCAAAT | | GCCTCCCTCACCATCTCTGGACTGA | |
| | GAACAGCCTGAGAGCCGAGGACAC | | AGACTGAGGACGAGGCTGACTACT | |
| | GGCCGTGTATTACTGTGCGTCTAAG | | ACTGTCAGTCTTATGATAGCAGCA | |
| | CTATGGTTACGTGGAAACTTTGACT | | ATCTAGTGTTCGGCGGAGGGACCA | |
| | ACTGGGGCCAGGGAACCCTGGTCAC | | AGCTGACCGTCCTAGGTCAGCCCA | |
| | CGTCTCCTCAGCCTCCACCAAGGGC | | AGGCTGCCCCCTCGGTCACTCTGTT | |
| | CCATCGGTCTTCCCCCTGGCACCCTC | | CCCGCCCTCCTCTGAGGAGCTTCAA | |
| | CTCCAAGAGCACCTCTGGGGGCACA | | GCCAACAAGGCCACACTGGTGTGT | |
| | GCGGCCCTGGGCTGCCTGGTCAAGG | | CTCATAAGTGACTTCTACCCGGGA | |
| | ACTACTTCCCCGAACCGGTGACGGT | | GCCGTGACAGTGGCCTGGAAGGCA | |
| | GTCGTGGAACTCAGGCGCCCTGACC | | GATAGCAGCCCCGTCAAGGCGGGA | |
| | AGCGGCGTGCACACCTTCCCGGCTG | | GTGGAGACCACCACACCCTCCAAA | |
| | TCCTACAGTCCTCAGGA | | CAAAGCAACAACAAGTACGCGGCC | |
| | | | AGCAGCTACCTGAGCCTGACGCCT | |
| | | | GAGCAGTGGAAGTCCCAC | |
| S179-20 | CAGGTGCAGCTGGTGGAGTCTGGGG | 2723 | GAAGTAGTGCTGACGCAGTCTCCA | 2772 |
| | GAGGCGTGGTCCAGCCTGGGAGGTC | | GCCACCCTGTCTGTGTCTCCAGGGG | |
| | CCTGAGACTCTCCTGTGCAGCGTCT | | AAAGAGCCACCCTCTCCTGCAGGG | |
| | GGATTCACCTTCAGTGGCTATGGCA | | CCAGTCAGAGTGTTAGCAGCAATT | |
| | TGCACTGGGTCCGCCAGGCTCCAGG | | TAGCCTGGTATCAGCAGAAACCTG | |
| | CAAGGGGCTGGAGTGGGTGGCAGTT | | GCCAGGCTCCCAGGCTCCTCATCTA | |
| | ATATGGTTTGATGGAAGTAATAAAT | | TGGTGCATCCACCAGGGCCACTGG | |
| | ACTATGCAGACTCCGTGAAGGGCCG | | TATCCCAGCCAGGTTCAGTGGCAG | |
| | ATTCACCATCTCCAGAGACAATTCC | | TGGGTCTGGGACAGAGTTCACTCT | |
| | AAGAACACGCTGTATCTGCAAATGA | | CACCATCAGCAGCCTGCAGTCTGA | |
| | ACAGCCTGAGAGCCGAGGACACGG | | AGATTTTGCAGTTTATTACTGTCAG | |
| | CTGTCTATTACTGTGCGAGAGATGC | | CAGTATAATAACTGGCCTCGGACG | |
| | GCGTTACTATGATACTAGTGGTTAT | | TTCGGCCAAGGGACCAAGGTGGAA | |
| | TTAGGGACAACAGAGTTTGACTACT | | ATCAAACGAACTGTGGCTGCACCA | |
| | GGGGCCAGGGAACCCTGGTCACCGT | | TCTGTCTTCATCTTCCCGCCATCTG | |
| | CTCCTCAGGGAGTGCATCCGCCCCA | | ATGAGCAGTTGAAATCTGGAACTG | |
| | ACCCTTTTCCCCCTCGTCTCCTGTGA | | CCTCTGTTGTGTGCCTGCTGAATAA | |
| | GAATTCCCCGTCGGATACGAGCAGC | | CTTCTATCCCAGAGAGGCCAAAGT | |
| | GTGGCC | | ACAGTGGAAGGTGGATAACGCCCT | |
| | | | CCAATCGGGTAACTCCCAGGAGAG | |
| | | | TGTCACAGAGCAGGACAGCAAGGA | |
| | | | CAGCACCTACAGCCTCAGCAGCAC | |
| | | | CCTGACGCTGAGCAAAGCAGACTA | |
| | | | CGAGAA | |
| S179-27 | CAGGTGCAGCTGGTGGAGTCTGGGG | 2724 | GACATCCAGATGACCCAGTCTCCA | 2773 |
| | GAGGCGTGGTCCAGCCTGGGAGGTC | | TCCTCCCTGTCTGCATCTGTAGGAG | |
| | CCTGAGACTCTCCTGTGCAGCCTCT | | ACAGAGTCACCATCACTTGCCAGG | |
| | GGATTCACCTTCAGGAGCTATGGCA | | CGAGTCAGGACATTAGCAACTATT | |
| | TGCACTGGGTCCGCCAGGCTCCAGG | | TAAATTGGTATCAGCAGAAACCAG | |
| | CAAGGGGCTGGAGTGGGTGGCAGTT | | GGAAAGCCCCTAAGCTCCTGATCT | |
| | ATATCATATGATGGAAGTAATAAAA | | ACGATGCATCCAATTTGGAAACAG | |
| | ACTATGCAGACTCCGTGAAGGGCCG | | GGGTCCCATCAAGGTTCAGTGGAA | |
| | ACTCACCATCTCCAGAGACAATTCC | | GTGGATCTGGGACAGATTTTACTTT | |
| | AAGAACACGCTGTATCTGCAAATGA | | CACCATCAGCAGCCTGCAGCCTGA | |
| | ACAGCCTGAGAGCTGAGGACACGG | | AGATATTGCAACATATTACTGTCA | |
| | CTGTGTATTACTGTGCGAAAGATCG | | ACAATATGATAATCTCCCCCTCACT | |
| | GGGTGGGTATAGCAGTGGCTGGACC | | TTCGGCGGAGGGACCAAGGTGGAG | |
| | TACTACTACTACGGTATGGACGTCT | | ATCAAACGAACTGTGGCTGCACCA | |
| | GGGGCCAAGGGACCACGGTCACCG | | TCTGTCTTCATCTTCCCGCCATCTG | |
| | TCTCCTCAGCCTCCACCAAGGGCCC | | ATGAGCAGTTGAAATCTGGAACTG | |
| | ATCGGTCTTCCCCCTGGCACCCTCCT | | CCTCTGTTGTGTGCCTGCTGAATAA | |
| | CCAAGAGCACCTCTGGGGGCACAGC | | CTTCTATCCCAGAGAGGCCAAAGT | |
| | GGCCCTGGGCTGCCTGGTCAAGGAC | | ACAGTGGAAGGTGGATAACGCCCT | |
| | TACTTCCCCGAACCGGTGACGGTGT | | CCAATCGGGTAACTCCCAGGAGAG | |
| | CGTGGAACTCAGGCGCCCTGACCAG | | TGTCACAGAGCAGGACAGCAAGGA | |
| | CGGCGTGCACACCTTCCCGGCTGTC | | CAGCACCTACAGCCTCAGCAGCAC | |
| | CTACAGTCCTCAGGACTCTACTCCC | | CCTGACGCTGAGCAAAGCAGACTA | |
| | TCAGCAGCGTGGTGACCGTGCCCTC | | CGAGAA | |
| | CAGCAGCTTGGGCACCCAGACCTAC | | | |
| | ATCTGCAACGTGAATCACAAGCCCA | | | |
| | GCAACACCAAGGTGGACA | | | |
| S179-28 | GAGGTGCAGCTGTTGGAGTCTGGGG | 2725 | GACATCCAGATGACCCAGTCTCCTT | 2774 |
| | GAGGCTTGGTACAGCCTGGGGGGTC | | CCACCCTGTCTGCATCTGTAGGAG | |
| | CCTGAGACTCTCCTGTGCAGCCTCT | | ACAGAGTCACCATCACTTGCCGGG | |
| | GGATTCACCTTTAGCAGCTATGCCA | | CCAGTCAGAGTATTACTAGCTGGTT | |
| | TGAGCTGGGTCCGCCAGGCTCCAGG | | GGCCTGGTATCAGCAGAAACCAGG | |
| | GAAGGGGCTGGAGTGGGTCTCAGCT | | GAAAGCCCCTAAGCTCCTGATCTA | |
| | ATTAGGGGTAGTGGTGGTAGCACAT | | TGATGCCTCCAGTTTGGAAAGTGG | |
| | ACTACGCAGACTCCGTGAAGGGCCG | | GGTCCCATCAAGGTTCAGCGGCAG | |
| | GTTCACCATCTCCAGAGACAATTCC | | TGGATCTGGGACAGAATTCACTCT | |
| | AAGAACACACTGTATCTGCAAATGA | | CACCATCAGCAGCCTGCAGCCTGA | |
| | ACAGCCTGAGAGCCGAGGACACGG | | TGATTTTGCAACTTATTACTGCCAA | |
| | CCGTATATTACTGTGCGAAAGGGGT | | CATTATAATAGTTATCCTTGGACGT | |
| | CCGCAGCTCGGATGACTACTTTGAG | | TCGGCCAAGGGACCAAGGTGGAAA | |
| | TACTGGGGCCAGGGAACCCTGGTCA | | TCAAACGAACTGTGGCTGCACCAT | |
| | CCGTCTCCTCAGCCTCCACCAAGGG | | CTGTCTTCATCTTCCCGCCATCTGA | |
| | CCCATCGGTCTTCCCCCTGGCACCCT | | TGAGCAGTTGAAATCTGGAACTGC | |
| | CCTCCAAGAGCACCTCTGGGGGCAC | | CTCTGTTGTGTGCCTGCTGAATAAC | |
| | AGCGGCCCTGGGCTGCCTGGTCAAG | | TTCTATCCCAGAGAGGCCAAAGTA | |
| | GACTACTTCCCCGAACCGGTGACGG | | CAGTGGAAGGTGGATAACGCCCTC | |
| | TGTCGTGGAACTCAGGCGCCCTGAC | | CAATCGGGTAACTCCCAGGAGAGT | |
| | CAGCGGCGTGCACACCTTCCCGGCT | | GTCACAGAGCAGGACAGCAAGGAC | |
| | GTCCTACAGTCCTCAGGACTCTACT | | AGCACCTACAGCCTCAGCAGCACC | |
| | CCCTCAGCAGCGTGGTGACCGTGCC | | CTGACGCTGAGCAAAGCAGACTAC | |
| | CTCCAGCAGCTTGGGCACCCAGACC | | GAGAA | |
| | TACATCTGCAACGTGAATCACAAGC | | | |
| | CCAGCAACACCAAGGTGGACA | | | |
| S210-1139 | GAGGTGCAGCTGGTGCAGTCTGGAG | 2726 | GAAATTGTGTTGACGCAGTCTCCA | 2775 |
| | CAGAGGTGAAAAAGCCCGGAGAGT | | GGCACCCTGTCTTTGTCTCCAGGGG | |
| | CTCTGAAGATCTCCTGTAAGGGTTC | | AAAGAGCCACCCTCTCCTGCAGGG | |
| | TGGATACTACTTTCCCAGCTACTGG | | CCAGTCAGAGTGTTAGCAGCAGCT | |
| | ATCGGCTGGGTGCGCCAGAAGCCCG | | ACTTAGCCTGGTACCAGCAGAAAC | |
| | GGAATGGCCCGGAGTGGATGGGAA | | CTGGCCAGGCTCCCAGACTCCTCAT | |
| | TCATCCATCCTGGTGACTCTGAAAG | | CTATGGTGCATCTAGCAGGGCCAC | |
| | CACATACAGCCCGTCCTTCCAAGGC | | TGGCATCCCAGACAGGTTCAGTGG | |
| | CAGGTCACCATCTCGGCCGACAAGT | | CAGTGGGTCTGGGACAGACTTCAC | |
| | CCATCAGCACCGCCTACCTGCAGTG | | TCTCACCATCAGCAGACTGGAGGC | |
| | GAGCAGCCTGAAGGCCTCGGACACC | | TGAAGATTTTGCAGTATATTACTGT | |
| | GCCATGTATTACTGTGCGCGACCGT | | CAGCTCTTTGGTAGCTCACCGACGT | |
| | TTTACTATGGTTCGGAGAGTCCCCC | | GGACGTTCGGCCAAGGGACCAAGG | |
| | CGGCTACTGGGGCCAGGGAACCCTG | | TGGAAATCAAACGAACTGTGGCTG | |
| | GTCACCGTCTCCTCAGGGAGTGCAT | | CACCATCTGTCTTCATCTTCCCGCC | |
| | CCGCCCCAACCCTTTTCCCCCTCGTC | | ATCTGATGAGCAGTTGAAATCTGG | |
| | TCCTGTGAGAATTCCCCGTCGGATA | | AACTGCCTCTGTTGTGTGCCTGCTG | |
| | CGAGCAGCGTG | | AATAACTTCTATCCCAGAGAGGCC | |
| | | | AAAGTACAGTGGAAGGTGGATAAC | |
| | | | GC | |
| S210-1262 | CAGCTGCAGCTGCAGGAGTCGGGCC | 2727 | CAGCTTGTGCTGACTCAATCGCCCT | 2776 |
| | CAGGACTAATGAAGCCTTCGGAGAC | | CTGCCTCTGCCTCCCTGGGAGCCTC | |
| | CCTGTCCCTCACCTGCACTGTCTCTG | | GGTCAAGCTCACCTGCACTCTGAG | |
| | GTGGCTCCATCAGCAGAAGCAATTA | | CAGTGGGCACAGCAGCTACGCCAT | |
| | CTACTGGGGCTGGATCCGCCAGCCC | | CGCATGGCATCAGCAGCAGCCAGA | |
| | CCAGGTAAGGGACTGGAGTGGATTG | | GAGGGGCCCTCGGTACTTGATGAA | |
| | GGAGTATCTATTATAGTGGGAGCAC | | GCTTAACGGTGATGGCAGCCACAG | |
| | CTACTACAACCCCTCCCTCAAGAGT | | CAAGGGGGACGGGATCCCTGATCG | |
| | CGAGTCACCATATCCGTAGACACGT | | CTTCTCAGGCTCCAGCTCTGGGGCT | |
| | CCCAGAACCAGTTCTCCCTGAAGAT | | GAGCGCTACCTCACCATCTCCAGC | |
| | GAGCTCTGTGACCGCCGCAGACACG | | CTCCAGTCTGAAGATGAGGCTGAC | |
| | GCTGTTTATTACTGTGCGAGCCTCTT | | TATTACTGTCAGACCTGGGGCACT | |
| | CGACTACGGTGACAACTACTGGGGC | | GACATTCAAGTGTTCGGCGGAGGG | |
| | CAGGGAACCCTGGTCACCGTCTCCT | | ACCAAGCTGACCGTCCTAGGTCAG | |
| | CAGCCTCCACCAAGGGCCCATCGGT | | CCCAAGGCTGCCCCCTCGGTCACTC | |
| | CTTCCCCCTGGCACCCTCCTCCAAG | | TGTTCCCGCCCTCCTCTGAGGAGCT | |
| | AGCAC | | TCAAGCCAACAAGGCCACACTGGT | |
| | | | GTGTCTCATAAGTGACTTCTACCCG | |
| | | | GGAGCCGTGACAGTGGCCTGGAAG | |
| | | | GCAGATAGCAGCCCCGTCAAGGCG | |
| | | | GGAGTGGAGACCACCACACCCTCC | |
| | | | AAACAAAGCAACAACAAGTACGCG | |
| | | | GCCAGCAGCTA | |
| S210-1611 | CAGGTGCAGCTGGTGCAGTCTGGGG | 2728 | GAAATTGTGTTGACACAGTCTCCA | 2777 |
| | CTGAGGTGAAGAAGCCTGGGTCCTC | | GCCACCCTGTCTTTGTCTCCAGGGG | |
| | GGTGAAGGTCTCCTGCAAGGCTTCT | | AAAGAGCCACCCTCTCCTGCAGGG | |
| | GGAGGCACCTTCAGCAGCTATGCTA | | CCAGTCAGAGTATTAGCAGCTTCTT | |
| | TCAGCTGGGTGCGACAGGCCCGTGG | | AGCCTGGTACCAACAGAAACCTGG | |
| | ACAAGGGCTTGAGTGGATGGGAGG | | CCAGGCTCCCAGGCTCCTCATCTAT | |
| | GATCATCCCTATCTTTGGTACAGCA | | GATGCATCCAACAGGGCCACTGGC | |
| | AACTACCCACAGAAGTTCCAGGGCA | | ATCCCAGCCAGGTTCAGTGGCAGT | |
| | GAGTCACGATTACCGCGGACGAATC | | GGGTCTGGGACAGACTTCATTCTC | |
| | CACGAGCACAGCCTACATGGAGCTG | | ACCATCAACAACCTAGAGCCTGAA | |
| | AGCAGCCTGAGATCTGAGGACACG | | GATTTTGCAGTTTATTACTGTCAGC | |
| | GCCGTGTATTACTGTGCGAGATATC | | AGCGTAGCAACTGGCCTCCGAAGC | |
| | ACGCCTATGATAGTAGTGGCTATTA | | TCACTTTCGGCGGAGGGACCAAGG | |
| | CGTTGACTATTGGGGCCAGGGAACC | | TGGAGATCAAACGAACTGTGGCTG | |
| | CTGGTCACCGTCTCCTCAGCATCCC | | CACCATCTGTCTTCATCTTCCCGCC | |
| | CGACCAGCCCCAAGGTCTTCCCGCT | | ATCTGATGAGCAGTTGAAATCTGG | |
| | GAGCCTCTGCAGCACCCAGCCAGAT | | AACTGCCTCTGTTGTGTGCCTGCTG | |
| | GGGAACGTGGTCATCGCCTGCCTGG | | AATAACTTCTATCCCAGAGAGGCC | |
| | TCCAGGGCTTCTTCCCCCAGGAGCC | | AAAGTACAGTGGAAGGTGGATAAC | |
| | ACTCAGTGTGACCTGGAGCGAAAGC | | GC | |
| | GGACAGGGCGTGACCGCCAGAAAC | | | |
| | TTCCC | | | |
| S210-727 | CAGGTGCAGCTGCAGGAGTCGGGCC | 2729 | GACATCCAGATGACCCAGTCTCCA | 2778 |
| | CAGGACTGGTGAAGCCTTCGGAGAC | | TCCTCACTGTCTGCATCTGTAGGAG | |
| | CCTGTCCCTCACCTGCACTGTCTCTG | | ACAGAGTCACCATCACTTGTCGGG | |
| | GTGGCTCCATGAGTAGCAGTTACTG | | CGAGTCAGGGCATTAGCAGTTATT | |
| | GAGCTGGATCCGGCAGCCCCCAGGG | | TAGCCTGGTTTCAGCAGAAACCAG | |
| | AAGGGACTGGAGTGGATTGGCTATA | | GGAAAGCCCCTAAGTCCCTGATCT | |
| | TCTATTACAGAGGGAGCACCAACTA | | ATGCTGCATCCAGTTTGCAAAGTG | |
| | CAACCCCTCCCTCAAGACTCGAGTC | | GGGTCCCATCAAAGTTCAGCGGCA | |
| | ACCATGTCAGTAGACACGTCCAAGA | | GTGGATCTGGGACAGATTTCACTCT | |
| | ACCAATTCTCGATGAAAATGACCTT | | CACCATCAGCAGCCTGCAGCCTGA | |
| | TATGACCGCTGCGGACACGGCCGTC | | AGATTTTGCAACTTATTACTGCCAA | |
| | TATTACTGTGCGCGAGAGGCGGCGT | | CAGTATAATAGATACCCTCCCACTT | |
| | TCAACTGGTTCGACTCCTGGGGCCA | | TCGGCGGAGGGACCAAGGTGGAGA | |
| | GGGAACCCTGGTCACCGTCTCCTCA | | TCAAGCGAACTGTGGCTGCACCAT | |
| | GGGAGTGCATCCGCCCCAACCCTTT | | CTGTCTTCATCTTCCCGCCATCTGA | |
| | TCCCCCTCGTCTCCTGTGAGAATTCC | | TGAGCAGTTGAAATCTGGAACTGC | |
| | CCGTCGGATACGAGCAGCGTG | | CTCTGTTGTGTGCCTGCTGAATAAC | |
| | | | TTCTATCCCAGAGAGGCCAAAGTA | |
| | | | CAGTGGAAGGTGGATAACGC | |
| S210-852 | GAGGTGCAGCTGGTGGAGTCTGGGG | 2730 | TCCTATGAGCTGACTCAGCCACCCT | 2779 |
| | GAGGCTTGGTCCAGCCTGGGGGGTC | | CAGTGTCCGTGTCCCCAGGACAGA | |
| | CCTGAGACTCTCCTGTGCAGCCTCT | | CAGCCAGCATCACCTGCTCTGGAG | |
| | GGATTCACCTTAAGTATTTATTGGA | | ATAAATTGGGGGATACATATGCTT | |
| | TGAGCTGGGTCCGCCAGGCTCCAGG | | GCTGGTATCAGCAGAAGCCAGGCC | |
| | GAAGGGGCTGGAGTGGGTGGCCAA | | AGTCCCCTGTACTGGTCATCTATCA | |
| | CATAAAGCAAGATGGACGTGAGAA | | AGATAGCAAGCGGCCCTCAGGGAT | |
| | ATACCATGTGGACTCTGTGAAGGGC | | CCCTGAGCGATTCTCTGGCTCCAAC | |
| | CGATTCACCATCTCCAGAGACAACG | | TCTGGGAACACAGCCACTCTGACC | |
| | CCAACAACTCACTGTATCTGCAAAT | | ATCAGCGGGACCCAGGCTATGGAT | |
| | GAACAACCTGAGAGCCGAGGACAC | | GAGGCTGACTATTACTGTCAGGCG | |
| | GGCTGTGTATTTCTGTGCGAGAGAT | | TGGGACAGCAGCACGTCTGTGGTA | |
| | GGTATAGCAGTGGCTGGGGGGTTTG | | TTCGGCGGAGGGACCAAGCTGACC | |
| | ACTACTGGGGCCAGGGAACCCTGGT | | GTCCTAGGTCAGCCCAAGGCTGCC | |
| | CACCGTCTCCTCAGGGAGTGCATCC | | CCCTCGGTCACTCTGTTCCCGCCCT | |
| | GCCCCAACCCTTTTCCCCCTCGTCTC | | CCTCTGAGGAGCTTCAAGCCAACA | |
| | CTGTGAGAATTCCCCGTCGGATACG | | AGGCCACACTGGTGTGTCTCATAA | |
| | AGCAGCGTG | | GTGACTTCTACCCGGGAGCCGTGA | |
| | | | CAGTGGCCTGGAAGGCAGATAGCA | |
| | | | GCCCCGTCAAGGCGGGAGTGGAGA | |
| | | | CCACCACACCCTCCAAACAAAGCA | |
| | | | ACAACAAGTACGCGGCCAGCAGCT | |
| | | | A | |
| S210-896 | CAGGTGCAGCTGGTGGAGTCTGGGG | 2731 | GAAATTGTGTTGACGCAGTCTCCA | 2780 |
| | GAGGCGTGGTCCAGCCTGGGAGGTC | | GGCACCCTGTCTTTGTCTCCAGGGG | |
| | CCTGAGACTCTCCTGTGCAGCCTCT | | AAAGAGCCACCCTCTCCTGCAGGG | |
| | GGATTCACCTTCAGTAGCTATGCTA | | CCAGTCAGAGTATTAGCAGCAACT | |
| | TGCACTGGGTCCGCCAGGCTCCAGG | | ACTTAGCCTGGTACCAGCAGAAAC | |
| | CAAGGGGCTGGAGTGGGTGGCAGTT | | CTGGCCAGGCTCCCAGGCTCCTCAT | |
| | ATATCATATGATGGAGGCAATAAAT | | CTATGGTGCATCCAGCAGGGCCAC | |
| | ACTACGCAGACTCCGTGAAGGGCCG | | TGGCATCCCAGACAGGTTCAGTGG | |
| | ATTCACCATCTCCAGAGACAATTCC | | CAGTGGGTCTGGGACAGACTTCAC | |
| | AAGAACACGCTGTATCTGCAAATGA | | TCTCACCATCAGCAGACTGGAGCC | |
| | ACAGCCTGAGAGCTGAGGACACGG | | TGAAGATTTTGCAGTGTATTACTGT | |
| | CTGTGTATTACTGTGCGAGAGGACA | | CAGCAGTATGGTAGCTCACCTCTC | |
| | TGGGAACTACCTTACCTACTTTGAC | | ACTTTCGGCCCTGGGACCAAAGTG | |
| | TACTGGGGCCAGGGAACCCTGGTCA | | GATATCAAACGAACTGTGGCTGCA | |
| | CCGTCTCCTCAGGGAGTGCATCCGC | | CCATCTGTCTTCATCTTCCCGCCAT | |
| | CCCAACCCTTTTCCCCCTCGTCTCCT | | CTGATGAGCAGTTGAAATCTGGAA | |
| | GTGAGAATTCCCCGTCGGATACGAG | | CTGCCTCTGTTGTGTGCCTGCTGAA | |
| | CAGCGTG | | TAACTTCTATCCCAGAGAGGCCAA | |
| | | | AGTACAGTGGAAGGTGGATAACGC | |
| S2141- | GAGGTGCAGCTGGTGGAGTCCGGG | 2732 | AATTTTATGCTGACTCAGCCCCACT | 2781 |
| 113 | GGAGGCTTAGTTCAGCCTGGGGGGT | | CTGTGTCGGAGTCTCCGGGGAAGA | |
| | CCCTGAGACTCTCCTGTGCAGCCTC | | CGGTAACCATCTCCTGCACCGGCA | |
| | TGGATTCACCTTCAGTAGCTCCTGG | | GCAGTGGCAGCATTGCCAGCAACT | |
| | ATACACTGGGTCCGCCAAGCTCCAG | | ATGTGCAGTGGTACCAGCAGCGCC | |
| | GGAAGGGGCTGGTGTGGGTCTCACG | | CGGGCAGTGCCCCCACCACTGTGA | |
| | TATTAATAGTGATGGGAGTAGCACA | | TCTATGAGGATAACCAAAGACCCT | |
| | ACCTACGCGGACTCCGTGAAGGGCC | | CTGGGGTCCCTGATCGGTTCTCTGG | |
| | GATTCACCATCTCCAGAGACAACGC | | CTCCATCGACAGCTCCTCCAACTCT | |
| | CAAGAACACGCTGTTTCTGCAAATG | | GCCTCCCTCACCATCTCTGGACTGA | |
| | AACAGTCTGAGAGCCGAGGACACG | | AGACTGAGGACGAGGCTGACTACT | |
| | GCTGTGTATTACTGTGCAAGAGCGG | | ACTGTCAGTCTTATGATACCAGCA | |
| | AGTGGCTACGCGGGCAGTTTGACTA | | ATCATGTGGTATTCGGCGGAGGGA | |
| | CTGGGGCCAGGGAACCCTGGTCACC | | CCAAGCTGACCGTCCTAGGTCAGC | |
| | GTCTCCTCACCACCCACCAAGGCTC | | CCAAGGCTGCCCCCTCGGTCACTCT | |
| | CGGATGTGTTCCCCATCATATCAGG | | GTTCCCGCCCTCCTCTGAGGAGCTT | |
| | GTGCAGACACCCAAAGGATAACAG | | CAAGCCAACAAGGCCACACTGGTG | |
| | CCCTGTGGTCCTGGCATGCTTGATA | | TGTCTCATAAGTGACTTCTACCCGG | |
| | ACTGGGTACCACCCAACGTCCGTGA | | GAGCCGTGACAGTGGCCTGGAAGG | |
| | CTGTCACCTGGTACATGGGGACACA | | CAGATAGCAGCCCCGTCAAGGCGG | |
| | GAGCCAGCCCCAGAGAACCTTCCCT | | GAGTGGAGACCACCACACCCTCCA | |
| | GAGATACAAAGACGGGACAGCTAC | | AACAAAGCAACAACAAGTACGCGG | |
| | TACATGACAAGCAGCCAGCTCTCCA | | CCAGCAGCTACCTGAGCCTGACGC | |
| | CCCCCCTCCAGCAGTGGCGCCAAGG | | CTGAGCAGTGGAAGTCCCACA | |
| | CGAGTACAAATGCGTGGTCCAGCA | | | |
| S2141-126 | GAGGTGCAGCTGGTGCAGTCTGGAG | 2733 | GACATCCAGATGACCCAGTCTCCTT | 2782 |
| | CAGAGGTGAAAAACCCGGGGGAGT | | CCACCCTGTCTGCATCTGTAGGAG | |
| | CTCTGAAGATCTCCTGTAAGGGTTC | | ACAGAGTCACCATCACTTGCCGGG | |
| | TGGATACAGGTTTACCACCTACTGG | | CCAGTCAGAGTATTAGTAGCTGGT | |
| | ATCGGCTGGGTGCGCCAGATGCCCG | | TGGCCTGGTATCAGCAGAAACCAG | |
| | GGAAAGGCCTGGAGTGGATGGGGA | | GGAAAGCCCCTAAGCTCCTGATCT | |
| | TCATCTATCCTGGTGACTCTGATACC | | ATGATGCCTCCAGTTTGGAAAGTG | |
| | AGATACAGCCCGTCCTTCGAAGGCC | | GGGTCCCATCAAGGTTCAGCGGCA | |
| | AGGTCACCATCTCAGCCGACAAGTC | | GTGGATCTGGGACAGAATTCACTC | |
| | CATCAGCACCGCCTACCTGCAGTGG | | TCACCATCAGCAGCCTGCAGCCTG | |
| | AGCAGCCTGAAGGCCTCGGACACCG | | ATGACTTTGCAACTTATTACTGCCA | |
| | CCATGTATTACTGTGCGAGGCACCC | | ACAGTATAATAGTCATTGGACGTT | |
| | CCTGGGCTTGGGGGGAAGTATTGAC | | CGGCCAAGGGACCAAGGTGGAAAT | |
| | TACTGGGGCCAGGGAACCCTGGTCA | | CAAACGAACTGTGGCTGCACCATC | |
| | CCGTCTCCTCAGCCTCCACCAAGGG | | TGTCTTCATCTTCCCGCCATCTGAT | |
| | CCCATCGGTCTTCCCCCTGGCACCCT | | GAGCAGTTGAAATCTGGAACTGCC | |
| | CCTCCAAGAGCACCTCTGGGGGCAC | | TCTGTTGTGTGCCTGCTGAATAACT | |
| | AGCGGCCCTGGGCTGCCTGGTCAAG | | TCTATCCCAGAGAGGCCAAAGTAC | |
| | GACTACTTCCCCGAACCGGTGACGG | | AGTGGAAGGTGGATAACGCCCTCC | |
| | TGTCGTGGAACTCAGGCGCCCTGAC | | AATCGGGTAACTCCCAGGAGAGTG | |
| | CAGCGGCGTGCACACCTTCCCGGCT | | TCACAGAGCAGGACAGCAAGGACA | |
| | GTCCTACAGTCCTCAGGACTCTACT | | GCACCTACAGCCTCAGCAGCACCC | |
| | CCCTCAGCAGCGTGGTGACCGTGCC | | TGACGCTGAGCAAAGCAGACTACG | |
| | CTCCAGCAGCTTGGGCACCCAGACC | | AGAA | |
| | TACATCTGCAACGTGAATCACAAGC | | | |
| | CCACCTTGGTGTTGCTGGGCTTGTG | | | |
| | ATTCAC | | | |
| S2141-16 | CAGGTGCAGTTACAGCAGTGGGGCG | 2734 | TCCTATGAACTGACTCAGTCACTCT | 2783 |
| | CAGGACTGTTGAAGCCTTCGGAGAC | | CAGTGTCAGTGGCCCTGGGACAGA | |
| | CCTGTCCCGCACCTGCGCTGTCTAT | | CGGCCAGAATTCCCTGTGGGGGAA | |
| | GGTGGGTCCTTCAGTGGTTACTACT | | ACAACATTGGAAGTAAAAATGTGC | |
| | GGAGCTGGATCCGCCAGACCCCAGG | | ACTGGTACCAGCAGAAGCCAGGCC | |
| | GAAGGGGCTGGAGTGGATTGGGGA | | AGGCCCCTGTGCTGGTCATCTACA | |
| | AATCAATCATGATGGAAGCACCATC | | GCGATCGCAACCGGCCCTCTGGGA | |
| | TACAACCCGTCCCTCAAGAGTCGAG | | TCCCTGAGCGATTCTCAGGCTCCAA | |
| | TCACCATATCGATAGACACGTCCAA | | CTCGGGGAACACGGCCACCCTGAC | |
| | GAACCAGTTCTCCCTGCAACTGAGC | | CATCAGCAGAGCCCAAGCCGGGGA | |
| | TCTGTGACCGCCGCGGACACGGCTG | | TGAGGCTGACTATTACTGTCAGGT | |
| | TGTACTACTGTGCGAGAGGGTCTAA | | GTGGGACAGTAGCTCTGTGGTATT | |
| | TCCTGGGGACTACTGGGGCCAGGGA | | CGGCGGAGGGACCAAGCTGACCGT | |
| | GCCCTGGTCACCGTCTCCTCAGCAC | | CCTACGTCAGCCCAAGGCTGCCCC | |
| | CCACCAAGGCTCCGGATGTGTTCCC | | CTCGGTCACTCTGTTCCCGCCCTCC | |
| | CATCATATCAGGGTGCAGACACCCA | | TCTGAGGAGCTTCAAGCCAACAAG | |
| | AAGGATAACAGCCCTGTGGTCCTGG | | GCCACACTGGTGTGTCTCATAAGT | |
| | CATGCTTGATAACTGGGTACCACCC | | GACTTCTACCCGGGAGCCGTGACA | |
| | AACGTC | | GTGGCCTGGAAGGCAGATAGCAGC | |
| | | | CCCGTCAAGGCGGGAGTGGAGACC | |
| | | | ACCACACCCTCCAAACAAAGCAAC | |
| | | | AACAAGTACGCGGCCAGCAGCTAT | |
| | | | CTGAGCCTGACGCCTGAGCAGTGG | |
| | | | AAGTCCCACA | |
| S2141-62 | CAGGTGCACCTGCAGGAGTCGGGCC | 2735 | CAGTCTGCCCTGACTCAGCCTACCT | 2784 |
| | CAGGACTGGTGAAGCCTTCACAGAC | | CCGTGTCTGGGTCTCCTGGACAGTC | |
| | CCTGTCCCTCACTTGCACTGTCTCTG | | GATCACCATCTCCTGCACTGGAAC | |
| | GTGTCTCCATCACCACTAGTGGCTC | | CAGCAGTGATGTTGGGCGTTATAA | |
| | CTACTGGAGCTGGATCCGCCAGTGC | | CCTTGTCTCCTGGTACCAACAGTAC | |
| | CCAGGGAAGGGCCTGGAGTGGATT | | CCAGGCAAAGCCCCCAAACTCATC | |
| | GGATACATCTATTCCACTGGGACCA | | ATTTTTGAGGTCAGTAAGCGGCCCT | |
| | CCTACTACAGTCCGTCCCTCAAGAG | | CAGGGGTCTCTGATCGCTTCTCTGC | |
| | TCGACTTACCATATCCCTAGACACG | | CTCAAAGTCTGGCAACACGGCCTC | |
| | TCTAGGAACCAATTCTCCCTGAACC | | CCTGACAATCTCTGGGCTCCAGGCT | |
| | TGAGTTCTGTGACTGCCGCGGACAC | | GACGACGAGGCTGATTATTACTGC | |
| | GGCCGTGTTTTTCTGTGCTAGAAAA | | TGCACATATGCTCTTACATTTTTGT | |
| | ACCTACATGGACTACTTTGACTACT | | TCGGCGGAGGGACCAAAGTGACCG | |
| | GGGGCCAGGGAGCCCTGATCACCGT | | TCCTAGGTCAGCCCAAGGCTGCCC | |
| | CTCCTCAGCCTCCACCAAGGGCCCA | | CCTCGGTCACTCTGTTCCCGCCCTC | |
| | TCGGTCTTCCCCCTGGCACCCTCCTC | | CTCTGAGGAGCTTCAAGCCAACAA | |
| | CAAGAGCACCTCTGGGGGCACAGC | | GGCCACACTGGTGTGTCTCATAAG | |
| | GGCCCTGGGCTGCCTGGTCAAGGAC | | TGACTTCTACCCGGGAGCCGTGAC | |
| | TACTTCCCCGAACCGGTGACGGTGT | | AGTGGCCTGGAAGGCAGATAGCAG | |
| | CGTGGAACTCAGGCGCCCTGACCAG | | CCCCGTCAAGGCGGGAGTGGAGAC | |
| | CGGCGTGCACACCTTCCCGGCTGTC | | CACCACACCCTCCAAACAAAGCAA | |
| | CTACAGTCCTCAGGA | | CAACAAGTACGCGGCCAGCAGCTA | |
| | | | TCTGAGCCTGACGCCTGAGCAGTG | |
| | | | GAAGTCCCAC | |
| S2141-63 | GAGGTGCAGTTGTTGGAGTCTGGGG | 2736 | GACATCCAGATGACCCAGTCTCCA | 2785 |
| | GAGGCTTGGTACAGCCTGGGGGGTC | | TCCTCCCTGTCTGCATCTGTAGGAG | |
| | CCTGAGACTCTCCTGTGCAGCCTCT | | ACAGGGTCACCATCACTTGCCGGT | |
| | GGATTCACCTTTTACGACTATGCCA | | CAGGTCAGAGCATTAGCACCTATT | |
| | TGAACTGGGTCCGCCAGACTCCAGG | | TAAATTGGTATCAGCAGAAACCAG | |
| | GGAGGGGCTGGAGTGGGTCTCAGCC | | GAAAAGCCCCTAAACTCCTGATCT | |
| | ATTAGTGGCAGTGGTGATCCCACAT | | ATGCTTCATCCAGTTTGCAAAGTGG | |
| | ACTACGCAGACTCCGTGAACGGCCG | | GGTCCCATCAAGGTTCAGTGGCAG | |
| | CTTCACCATCTCCAGAGACAATTCC | | TGGATCTGGGACAGATTTCACTCTC | |
| | AAGAACACACTGTATCTGCAAATGA | | ACCATCAGCAGTCTGCAACCTGAA | |
| | ACAGTCTGAGAGCCGAGGATACGG | | GATTTTGCAACTTACTACTGTCAAC | |
| | CCATATATTATTGTGCGAAAGACAT | | AGAGTTTCCTTCCCCCTCGAACTTT | |
| | GGAGGACTTCGGTTTTAGTTGGGGC | | TGGCCAGGGAACCAAGCTGGAGAT | |
| | CAGGGAACCCTGGTCACCGTCTCCT | | CAAACGAACTGTGGCTGCACCATC | |
| | CAGCACCCACCAAGGCTCCGGATGT | | TGTCTTCATCTTCCCGCCATCTGAT | |
| | GTTCCCCATCATATCAGGGTGCAGA | | GAGCAGTTGAAATCTGGAACTGCC | |
| | CACCCAAAGGATAACAGCCCTGTGG | | TCTGTTGTGTGCCTGCTGAATAACT | |
| | TCCTGGCATGCTTGATAACTGGGTA | | TCTATCCCAGAGAGGCCAAAGTAC | |
| | CCACCCAACGTCCGTGACTGTCACC | | AGTGGAAGGTGGATAACGCCCTCC | |
| | TGGTACATGGG | | AATCGGGTAACTCCCAGGAGAGTG | |
| | | | TCACAGAGCAGGACAGCAAGGACA | |
| | | | GCACCTACAGCCTCAGCAGCACCC | |
| | | | TGACGCTGAGCAAAGCAGACTACG | |
| | | | AGAA | |
| S2141-65 | GACGTGCAGCTGGTGCAGTCTGGAG | 2737 | GACATCCAGATGACCCAGTCTCCTT | 2786 |
| | CAGAGGTGACAAAGCCGGGGGAGT | | CCACCCTGTCTGCATCTGTAGGAG | |
| | CTCTGAAGATCTCCTGTAAGGGTTC | | ACAGAGTCACCATCACTTGCCGGG | |
| | TGGATACAGCTTTACCACCTACTGG | | CCAGTCAGAGTATTAGTAGCTGGT | |
| | ATCGGCTGGGTGCGCCAGATGCCCG | | TGGCCTGGTATCAGCAGAAACCAG | |
| | GGAAAGGCCTGGAGTGGATGGGGA | | GGAAAGCCCCTAAGCTCCTGATCT | |
| | TCATCTATCCTGGTGACTCTGATACC | | ATGATGCCTCCAGTTTGGAAGGTG | |
| | AGATACAGCCCGTCCTTCCAAGGCC | | GGGTCCCATCAAGGTTCAGCGGCA | |
| | AGGTCACCATCTCAGTCGACAAGTC | | GTGGATCTGGGACAGAATTCACTC | |
| | CATCAGCACCGCCTACCTGCAGTGG | | TCACCATCAGCAGCCTGCAGCCTG | |
| | AGCAGCCTGAAGGCCTCGGACACCG | | ATGATTTTGCAACTTATTACTGCCA | |
| | CCATGTATTACTGTGCGAGACAGTT | | ACAGTATAATAGTTATCCCCGGAC | |
| | TTGTGGTGGTGACTGCCCCTTTGACT | | GTTCGGCCAAGGGACCAAGGTGGA | |
| | ACTGGGGCCGGGGAACCCTGGTCAC | | AATCAAACGAACTGTGGCTGCACC | |
| | CGTCTCCTCAGCTTCCACCAAGGGC | | ATCTGTCTTCATCTTCCCGCCATCT | |
| | CCATCGGTCTTCCCCCTGGCGCCCT | | GATGAGCAGTTGAAATCTGGAACT | |
| | GCTCCAGGAGCACCTCTGGGGGCAC | | GCCTCTGTTGTGTGCCTGCTGAATA | |
| | AGCGGCCCTGGGCTGCCTGGTCAAG | | ACTTCTATCCCAGAGAGGCCAAAG | |
| | GACTACTTCCCCGAACCGGTGACGG | | TACAGTGGAAGGTGGATAACGCCC | |
| | TGTCGTGGAACTCAGGCGCCCTGAC | | TCCAATCGGGTAACTCCCAGGAGA | |
| | CAGCGGCGTGCACACCTTCCCGGCT | | GTGTCACAGAGCAGGACAGCAAGG | |
| | GTCCTACAGTCCTCAGGACTCTACT | | ACAGCACCTACAGCCTCAGCAGCA | |
| | CCCTCAGCAGCGTGGTGACCGTGCC | | CCCTGACGCTGAGCAAAGCAGACT | |
| | CTCCAGCAGCTTGGGCACCCAGACC | | ACGAGAA | |
| | TACACCTGCAACGTGAATCACAAGC | | | |
| | CCAGCAACACCAAGGTGGACAA | | | |
| S2141-97 | CAGGTCCAGCTTGTGCAGTCTGGGG | 2738 | GAAATTGTGTTGACGCAGTCTCCA | 2787 |
| | CTGAGGTGAAGAAGCCTGGGGCCTC | | GGCACCCTGTCTTTGTCTCCAGGGG | |
| | AGTGAAGGTTTCCTGCAAGGCTTCT | | AAAGAGCCACCCTCTCCTGCAGGG | |
| | GGATACACCTTCACTAGATATGGTA | | CCAGTCAGAGAGTTAGCAGCAGCT | |
| | TGCATTGGGTGCGCCAGGCCCCCGG | | ACATAGCCTGGTACCAGCAGAAAC | |
| | ACAAAGGCTTAAGTGGATGGGATG | | CTGGCCAGGCTCCCAGGCTCCTCAT | |
| | GATCAACGCTGGCAATGGTAACACA | | CTTTGGTACATCCAGCAGGGCCAC | |
| | AAATATTCACAGAAGTTCCAGGGCA | | TGGCATCCCAGACAGGTTCAGTGG | |
| | GACTCACCATTAGCAGGGACACATC | | CAGTGGGTCCGGGACAGACTTCAC | |
| | CGCGAGCACAGCCTACATGGAGGTG | | TCTCACCATCAGCAGACTGGAGCC | |
| | AGCAGTCTGAGATCTGAAGACACGG | | TGAAGATTTTGCACTGTATTACTGT | |
| | CTGTGTATTACTGTGCGAGATCGGG | | CAACAGTATGGTAGCTCACCGTAC | |
| | TATAGCAGCAGCTGGTAGTAAAGTA | | ACTTTTGGCCAGGGGACCAAGCTG | |
| | ATCTACTACTACGATATGGACGTCT | | GAGATCAAACGAACTGTGGCTGCA | |
| | GGGGCCAAGGGACCACGGTCACCG | | CCATCTGTCTTCATCTTCCCGCCAT | |
| | TCTCCTCAGCACCCACCAAGGCTCC | | CTGATGAGCAGTTGAAATCTGGAA | |
| | GGATGTGTTCCCCATCATATCAGGG | | CTGCCTCTGTTGTGTGCCTGCTGAA | |
| | TGCAGACACCCAAAGGATAACAGC | | TAACTTCTATCCCAGAGAGGCCAA | |
| | CCTGTGGTCCTGGCATGCTTGATAA | | AGTACAGTGGAAGGTGGATAACGC | |
| | CTGGGTACCACCCAACGTCCGTGAC | | CCTCCAATCGGGTAACTCCCAGGA | |
| | TGTCACCTGGTACATGGGGACACAG | | GAGTGTCACAGAGCAGGACAGCAA | |
| | AGCCAGCCCCAGAGAACCTTCCCTG | | GGACAGCACCTACAGCCTCAGCAG | |
| | AGATACAAAGACGGGACAGCTACT | | CACCCTGACGCTGAGCAAAGCAGA | |
| | ACATGACAAGCAGCCAGCTCTCCAC | | CTACGAGAA | |
| | CCCCCTCCAGCAGTGGCGCCAAGGC | | | |
| | GAGTACAAATGCGTGGTCCAGCA | | | |
| S24_342 | CAGGTGCAACTGGTGCAGTCTGGGG | 2739 | CACTCTGCCCTGACTCAGCCTCCCT | 2788 |
| | CTGAGGTGAAGATGCCTGGGGCCTC | | CCGCGTCTGGGTCTCCTGGACAGTC | |
| | AGTGATTGTTTCCTGCAAGGCATCT | | AGTCACCATTTCCTGCACTGGAACC | |
| | GGATACACCTTCAGCACCTACTATA | | AGCAGTGACGTTGGTGGTTATAAC | |
| | TTCACTGGGTGCGACAGGCCCCTGG | | CATGTCTCCTGGTACCAACAGCAC | |
| | ACAAGGGCTTGAGTGGATGGGAAG | | CCAGGCAAAGCCCCCAAATTAATG | |
| | AATCACCCCCCGCGATGGTGACACA | | GTTTATGAGGTCAATCAGCGGCCC | |
| | ACCTACGCACAGGTGTTGCAGGGCA | | TCAGGGGTCCCTGATCGCTTCACTG | |
| | GAGTCACATTGACCAGGGACACGTC | | GCTCCAAGTCTGGCAACACGGCCT | |
| | CGCGAGCACAGCCTACATGGAGCTG | | CCCTGACCGTCTCTGGGCTCCAGGC | |
| | AGCAGCCTGACATATGAGGACACG | | TGAGGATGAGGCTGATTATTATTG | |
| | GCCGTCTATTATTGTGCGAGAGATG | | CAACTCATATACAGACAGGAACAA | |
| | GACATCACTGGGACTTTGACTTCTG | | GTGGGTGTTCGGCGGAGGGACCAG | |
| | GGGCCGGGGAACCCTGGTCGCCGTC | | GCTGACCGTCCTAGGTCAGCCCAA | |
| | TCCTCAGCCTCCACCAAGGGCCCAT | | GGCTGCCCCCTCGGTCACTCTGTTC | |
| | CGGTCTTCCCCCTGGCGCCCTGCTCC | | CCGCCCTCCTCTGAGGAGCTTCAA | |
| | AGGAGCACCTCCGAGAGCACAGCG | | GCCAACAAGGCCACACTGGTGTGT | |
| | GCCCTGGGCTGCCTGGTCAAGGACT | | CTCATAAGTGACTTCTACCCGGGA | |
| | ACTTCCCCGAACCGGTGACGGTGTC | | GCCGTGACAGTGGCCTGGAAGGCA | |
| | GTGGAACTCAGGCGCCCTGACCAGC | | GATAGCAGCCCCGTCAAGGCGGGA | |
| | GGCGTGCACACCTTCCCGGCTGTCC | | GTGGAGACCACCACACCCTCCAAA | |
| | TACAGTCCTCAGG | | CAAAGCAACAACAAGTACGCGGCC | |
| | | | AGCAGCTA | |
| S24-1047 | CAGGTGCAGCTGAAGCAGTCTGGGG | 2740 | CACTCTGCCCTGACTCAGCCTCCCT | 2789 |
| | CTGAGGTGAAGGAGCCCGGGGGCT | | CCGCGTCTGGGTCTCCTGGACAGTC | |
| | CAGTGAAGCTTTCCTGCAAGGCGTC | | AGTCACCATTTCCTGCACTGGAACC | |
| | TGGATACACCTTCACCTCCCGCTAT | | AGCGATGACGTTGGTGGTTATAAC | |
| | ATACACTGGGTGCGACAGGCCCCTG | | CATGTCTCCTGGTATCAACAGCACC | |
| | GACAAGGGCTTGAGTGGGTGGGAA | | CAGGCAAAGCCCCCAAATTAGTGA | |
| | GACTTATTCCCAGTGACGGTGGCAC | | TTTATGAGGTCACTGAGCGGCCCTC | |
| | AACCTACGCACAGAAATTTCGCGGC | | AGGGGTCCCTGATCGCTTCACTGG | |
| | AGAGTCACCATGACCAGCGACACGT | | CTCCAAGTCTGGCAACACGGCCTC | |
| | CCGCGACCACAGCCTACATGGAGCT | | CCTGACCGTCTCTGGGCTCCAGGCT | |
| | GAGCAGCCTTGGATCTGGCGACACG | | GAGGATGAGGCTGATTATTACTGC | |
| | GCCGTCTATTACTGTGCGCGAGACG | | AACTCATATAAAAGGGGCAACACT | |
| | GGACTCACTGGGACTTTGACTTCTG | | TGGGTGTTCGGCGGAGGGACCAGG | |
| | GGGCCAGGGAACCCTGGTCACCGTC | | CTGACCGTCCTAGGTCAGCCCAAG | |
| | TCCTCTGCATCCCCGACCAGCCCCA | | GCTGCCCCCTCGGTCACTCTGTTCC | |
| | AGGTCTTCCCGCTGAGCCTCGACAG | | CGCCCTCCTCTGAGGAGCTTCAAG | |
| | CACCCCCCAAGATGGGAACGTGGTC | | CCAACAAGGCCACACTGGTGTGTC | |
| | GTCGCATGCCTGGTCCAGGGCTTCT | | TCATAAGTGACTTCTACCCGGGAG | |
| | TCCCCCAGGAGCCACTCAGTGTGAC | | CCGTGACAGTGGCCTGGAAGGCAG | |
| | CTGGAGCGAAAGCGGACAGAACGT | | ATAGCAGCCCCGTCAAGGCGGGAG | |
| | GACCGCCAGAAACTTCCC | | TGGAGACCACCACACCCTCCAAAC | |
| | | | AAAGCAACAACAAGTACGCGGCCA | |
| | | | GCAGCTA | |
| S24-223 | CAGATCACCTTGAAGGAGTCTGGTC | 2741 | CAGTCTGCCCTGACTCAGCCTGCCT | 2790 |
| | CTACGCTGGTGAAACCCACACAGAC | | CCGTGTCTGGGTCTCCTGGACAGTC | |
| | CCTCACGCTGACCTGCACCTTCTCTG | | GATCACCATCTCCTGCACTGGAAC | |
| | GGTTCTCACTCAACACTAGTGGAGT | | CAGCAGTGACGTTGGTGGTTATAA | |
| | GGGTGTGGGCTGGATCCGTCAGCCC | | CTATGTCTCCTGGTACCAACAACAC | |
| | CCAGGAAAGGCCCTGGAGTGGCTTG | | CCAGGCAAAGCCCCCAAACTCATG | |
| | CACTCATTTATTGGGATGATGATAA | | ATTTATGATGTCAGTAATCGGCCCT | |
| | GCGCTACAGCCCATCTCTGAAGAGC | | CAGGGGTTTCTAATCGCTTCTCTGG | |
| | AGGCTCACCATCACCAAGGACACCT | | CTCCAAGTCTGGCAACACGGCCTC | |
| | CCAAAAACCAGGTGGTCCTTACAAT | | CCTGACCATCTCTGGGCTCCAGGCT | |
| | GACCAACATGGACCCTGTGGACACA | | GAGGACGAGGCTGATTATTACTGC | |
| | GCCACATATTACTGTGCACACCATA | | AACTCATATACAAGCAGCAGCACT | |
| | CGATTGTTCCAATTTTTGACTACTGG | | CTCGTGGTATTCGGCGGAGGGACC | |
| | GGCCAGGGAACCCTGGTCACCGTCT | | AAGCTGACCGTCCTAGGTCAGCCC | |
| | CCTCAGGGAGTGCATCCGCCCCAAC | | AAGGCTGCCCCCTCGGTCACTCTGT | |
| | CCTTTTCCCCCTCGTCTCCTGTGAGA | | TCCCGCCCTCCTCTGAGGAGCTTCA | |
| | ATTCCCCGTCGGATACGAGCAGCGT | | AGCCAACAAGGCCACACTGGTGTG | |
| | G | | TCTCATAAGTGACTTCTACCCGGGA | |
| | | | GCCGTGACAGTGGCCTGGAAGGCA | |
| | | | GATAGCAGCCCCGTCAAGGCGGGA | |
| | | | GTGGAGACCACCACACCCTCCAAA | |
| | | | CAAAGCAACAACAAGTACGCGGCC | |
| | | | AGCAGCTATCTGAGCCTGACGCC | |
| S24-237 | CAGGTGCAGCTGCAGGAGTCGGGCC | 2742 | GACATCGTGATGACCCAGTCTCCA | 2791 |
| | CAGGACTGGTGAAGCCTTCGGGGAC | | GACTCCCTGGCTGTGTCTCTGGGCG | |
| | CCTGTCCCTCACCTGCTCTGTCTCTG | | AGAGGGCCACCATCAACTGCAAGT | |
| | GTGGCTCCATCAATAGTTCCTTCTG | | CCAGCCAGACTGTTTCATACACCTC | |
| | GAGCTGGATCCGGCAGCCCCCAGGG | | CAACAATAAGAACTACCTAGCTTG | |
| | AAGGGACTGGAGTGGATTGGGTATA | | GTACCAGCAGAAACCAGGACAGCC | |
| | TCTATTACCGTGGGAGCACCAATTA | | TCCTAACCTGCTCATTTACTGGGCA | |
| | CAACCCCTCCCTCAAGAGTCGAGTC | | TCTACCCGGGAATCCGGGGTCCCT | |
| | ACCATATCAGTGGACACGTCCAACA | | GACCGATTCAGTGGCAGCGGGTCT | |
| | ATCAGTTCTCCCTGAAGCTGACCTC | | GGGACAGATTTCACTCTCACCATC | |
| | TATGACCGCTGCGGACTCGGCCGTG | | AACAGCCTGCAGGCTGAAGATGTG | |
| | TATTACTGTGCGCGAGAAACCCGAT | | GCAGTTTATTACTGTCAGCAATATT | |
| | ACAACTGGTTCGACTCCTGGGGCCA | | ATACTACTCCGTGGACGTTCGGCC | |
| | GGGAACCCGGGTCACCGTCTCCTCA | | AAGGGACCAAGGTGGAAATCAAAC | |
| | GCCTCCACCAAGGGCCCATCGGTCT | | GAACTGTGGCTGCACCATCTGTCTT | |
| | TCCCCCTGGCGCCCTGCTCCAGGAG | | CATCTTCCCGCCATCTGATGAGCAG | |
| | CACCTCCGAGAGCACAGCGGCCCTG | | TTGAAATCTGGAACTGCCTCTGTTG | |
| | GGCTGCCTGGTCAAGGACTACTTCC | | TGTGCCTGCTGAATAACTTCTATCC | |
| | CCGAACCGGTGACGGTGTCGTGGAA | | CAGAGAGGCCAAAGTACAGTGGAA | |
| | CTCAGGCGCCCTGACCAGCGGCGTG | | GGTGGATAACGC | |
| | CACACCTTCCCGGCTGTCCTACAGT | | | |
| | CCTCAGGA | | | |
| S305-1456 | CAGGTCCAGCTGGTACAGTCTGGGG | 2743 | GAAATAGTGATGACGCAGTCTCCA | 2792 |
| | CTGAGGTGAAGAAGCCTGGGGCCTC | | GCCACCCTGTCTGTGTCTCCAGGGG | |
| | AGTGAAGGTCTCCTGCAAGGTTTCC | | AAAGAGCCACCCTCTCCTGCAGGG | |
| | GGATACACCCTCACTGAATTATCCA | | CCAGTCAGAATGTTAGCAGCAACT | |
| | TGCACTGGGTGCGGCAGGCTCCTGG | | TAGCCTGGTACCAACAGAAACCTG | |
| | AAAAGGGCTTGAGTGGATGGGAGG | | GCCAGGCTCCCAGGCTCCTCATCTA | |
| | TTTTGATCCTGAAGATGCTGAAACA | | TGGTGCATCCACCAGGGCCACTGG | |
| | ATCTACGCACAGAAGTTCCAGGGCA | | TATCCCGGCCAGGTTCAGTGGCAG | |
| | GAGTCACCATGACCGAGGACACATC | | TGGGTCTGGGACAGAGTTCACTCT | |
| | TACAGACACAGCCTACATGGAGCTG | | CACCATCAGCAGCCTGCAGTCTGA | |
| | AGCAGCCTGAGATCTGAGGACACG | | AGATTTTGCAGTTTATTACTGTCAG | |
| | GCCGTGTATTACTGTGCAACAGGGG | | CAGTATAATAACTGGCCTCACACTT | |
| | GCTTTCCCGTCAATAGCCTTTACGAT | | TCGGCCCTGGGACCAAAGTGGATA | |
| | ATTTTGACTGGTTACCTTGACTACTG | | TCAAACGAACTGTGGCTGCACCAT | |
| | GGGCCAGGGAACCCTGGTCACCGTC | | CTGTCTTCATCTTCCCGCCATCTGA | |
| | TCCTCAGCCTCCACCAAGGGCCCAT | | TGAGCAGTTGAAATCTGGAACTGC | |
| | CGGTCTTCCCCCTGGCGCCCTGCTCC | | CTCTGTTGTGTGCCTGCTGAATAAC | |
| | AGGAGCACCTCCGAGAGCACAGCG | | TTCTATCCCAGAGAGGCCAAAGTA | |
| | GCCCTGGGCTGCCTGGTCAAGGACT | | CAGTGGAAGGTGGATAACGC | |
| | ACTTCCCCGAACCGGTGACGGTGTC | | | |
| | GTGGAACTCAGGCGCTCTGACCAGC | | | |
| | GGCGTGCACACCTTCCCAGCTGTCC | | | |
| | TACAGTCCTCAGGA | | | |
| S305-223 | CAGGTGCAGTTGGTGGAGTCTGGGG | 2744 | GAAATTGTGTTGACACAGTCTCCA | 2793 |
| | GAGGCGTGGTCCAGCCTGGAAGGTC | | GCCACCCTGTCTTTGTCTCCAGGGG | |
| | CCTGAGACTCTCCTGTGCAGCGTCT | | AAAGAGCCACCCTCTCCTGCAGGG | |
| | GGATTCACCTTCAGAAACTTTGGCA | | CCAGTCAGAGTGTTAGCACCTCCTT | |
| | TGCACTGGGTCCGCCAGGCTCCAGG | | AGCCTGGTACCAACAGAAATGTGG | |
| | CAAGGGGCTGGAGTGGGTGGCATTT | | CCAGGCTCCCCGGCTCCTCATCTAT | |
| | ATATGGACTGCTGAAAGTGATAAAT | | GATGCATCCAACAGGGCCACTGGC | |
| | TCTATGCAGACTCCGTGAAGGGCCG | | ATCCCAGCCAGGTTCAGTGGCAGT | |
| | ATTCACCGTCTCCAGAGACAATTCG | | GGGTCTGGGACAGACTTCACTCTC | |
| | AAGAACACGCTGTATTTGGAAATGA | | ACCATCAGCAGCCTAGAGCCTGAA | |
| | ACAGCCTGAGAGCCGAGGACACGG | | GATTTTGCAGTTTATTACTGTCAAC | |
| | CTGTGTATTACTGTACGAAAGCGAT | | AGCGTGGCAACTGGCCCTTCACTTT | |
| | GGACGTCTGGGGCAGAGGGACCAC | | CGGCCCTGGGACCAGAGTGGATAT | |
| | GGTCACCGTCTCCTCAGCATCCCCG | | CAAACGAACTGTGGCTGCACCATC | |
| | ACCAGCCCCAAGGTCTTCCCGCTGA | | TGTCTTCATCTTCCCGCCATCTGAT | |
| | GCCTCTGCAGCACCCAGCCAGATGG | | GAGCAGTTGAAATCTGGAACTGCC | |
| | GAACGTGGTCATCGCCTGCCTGGTC | | TCTGTTGTGTGCCTGCTGAATAACT | |
| | CAGGGCTTCTTCCCCCAGGAGCCAC | | TCTATCCCAGAGAGGCCAAAGTAC | |
| | TCAGTGTGACCTGGAGCGAAAGCGG | | AGTGGAAGGTGGATAACGC | |
| | ACAGGGCGTGACCGCCAGAAACTTC | | | |
| | CC | | | |
| S305-399 | CAGGTCCAGCTGGTACAGTCTGGGG | 2745 | GAAATAGTGATGACGCAGTCTCCA | 2794 |
| | CTGAGGTGAAGAAGCCTGGGGCCTC | | GCCACCCTGTCTGTGTCTCCAGGGG | |
| | AGTGAAGGTCTCCTGCAAGGTTTCC | | AAAGAGCCACCCTCTCCTGCAGGG | |
| | GGATACACCCTCACTGAATTATCCA | | CCAGTCAGAGTATTACTAGCAACT | |
| | TGCACTGGGTGCGACAGGCTCCTGG | | TAGCCTGGTACCAGCAGAAACCTG | |
| | AAAAGGGCTTGAGTGGATGGGAGG | | GCCAGGCTCCCAGGCTCCTCATCTA | |
| | TTTTGATCCTGAAGATGGTGAAACA | | TGGTGCATCCACCAGGGCCACTGG | |
| | ATCTACGCACAGAAGTTCCAGGGCA | | TATCCCAGCCAGGTTCAGTGGCAG | |
| | GAGTCACCATGACCGAAGACACATC | | TGGGTCTGGGACAGAGTTCACTCT | |
| | TACAGACACAGCCTACATGGAGCTG | | CACCATCAGCAACCTGCAGTCTGA | |
| | AGCAGCCTGAGATCTGAGGACACG | | AGATTTTGCAGTTTATTACTGTCAG | |
| | GCCGTGTATTACTGTGCAACAGGGG | | CAGTATAATAACTGGCCTCTGACG | |
| | GATTGGGTTGTTCTAATGGGGTATG | | TTCGGCCAAGGGACCAAGGTGGAA | |
| | CAACAACTGGTTCGACCCCTGGGGC | | ATCAAACGAACTGTGGCTGCACCA | |
| | CTGGGAACCCTGGTCACCGTCTCCT | | TCTGTCTTCATCTTCCCGCCATCTG | |
| | CAGGGAGTGCATCCGCCCCAACCCT | | ATGAGCAGTTGAAATCTGGAACTG | |
| | TTTCCCCCTCGTCTCCTGTGAGAATT | | CCTCTGTTGTGTGCCTGCTGAATAA | |
| | CCCCGTCGGATACGAGCAGCGTG | | CTTCTATCCCAGAGAGGCCAAAGT | |
| | | | ACAGTGGAAGGTGGATAACGCCCT | |
| | | | CCAATCGGGTAACTCCCAGGAGAG | |
| | | | TGTCACAGAGCAGGACAGCAA | |
| S305-968 | GAGGTGCAGCTGGTGGAGTCTGGGG | 2746 | TCCTATGAGCTGACTCAGCCACCCT | 2795 |
| | GAGGCTTGGTCCAGCCTGGGGGGTC | | CAGTGTCCGTGTCCCCAGGACAGA | |
| | CCTGAGACTCTCCTGTGCAGCCTCT | | CAGCCAGCATCACCTGCTCTGGAG | |
| | GGATTCACCTTTAGTAGCTATTGGA | | ATAAATTGGGGGATAAATATGCTT | |
| | TGAGCTGGGTCCGCCAGGCTCCAGG | | GCTGGTATCAGCAGAAGCCAGGCC | |
| | GAAGGGGCTGGAGTGGGTGGCCAA | | AGTCCCCTGTGCTGGTCATCTATCA | |
| | CATAAAGCAAGATGGAAGTGAGAA | | AGATAGCAAGCGGCCCTCAGGGAT | |
| | ATACTATGTGGACTCTGTGAAGGGC | | CCCTGAGCGATTCTCTGGCTCCAAC | |
| | CGATTCACCATCTCCAGAGACAACG | | TCTGGGAACACAGCCACTCTGACC | |
| | CCAAGAACTCACTGTATCTGCAAAT | | ATCAGCGGGACCCAGGCTATGGAT | |
| | GAACAGCCTGAGAGCCGAGGACAC | | GAGGCTGACTATTACTGTCAGGCG | |
| | GGCCGTGTATTACTGTGCGAGGGAT | | TGGGACAGCAGCACTAATGTGGTA | |
| | AGTATAGCAGTGGCTGGGGGCTTTG | | TTCGGCGGAGGGACCAAGCTGACC | |
| | ACTACTGGGGCCAGGGAACCCTGGT | | GTCCTAGGTCAGCCCAAGGCTGCC | |
| | CACCGTCTCCTCAGGGAGTGCATCC | | CCCTCGGTCACTCTGTTCCCGCCCT | |
| | GCCCCAACCCTTTTCCCCCTCGTCTC | | CCTCTGAGGAGCTTCAAGCCAACA | |
| | CTGTGAGAATTCCCCGTCGGATACG | | AGGCCACACTGGTGTGTCTCATAA | |
| | AGCAGCGTG | | GTGACTTCTACCCGGGAGCCGTGA | |
| | | | CAGTGGCCTGGAAGGCAGATAGCA | |
| | | | GCCCCGTCAAGGCGGGAGTGGAGA | |
| | | | CCACCACACCCTCCAAACAAAGCA | |
| | | | ACAACAAGTACGCGGCCAGCAGCT | |
| | | | ACCTGAGCCTGACGCCTGAGCAGT | |
| | | | GGAAGTCCCAC | |
| S376-1070 | CAGGTGCAGCTGGTGGAGTCTGGGG | 2747 | CAGTCTGCCCTGACTCAGCCTCGCT | 2796 |
| | GAGGCGTGGTCCAGCCTGGGAGGTC | | CAGTGTCCGGGTCTCCTGGACAGT | |
| | CCTGAGACTCTCCTGTGCAGCGTCT | | CAGTCACCATCTCCTGCACTGGAA | |
| | GGATTCACCTTCAGTAGCTATGGCA | | GCAGCAGTGATGTTGGTCGTTATA | |
| | TGCACTGGGTCCGCCAGGCTCCAGG | | ACTATGTCTCCTGGTACCAGCAAC | |
| | CAAGGGGCTGGAGTGGGTGGCAGTT | | ACCCAGGCAAAGCCCCCAAACTCA | |
| | ATATGGTATGATGGAAGTAATAAAT | | TGACTTATGATGTCACTAGGCGGC | |
| | ACTATGCAGACTCCGTGAAGGGCCG | | CCTCAGGGGTCCCTGCTCGCTTCTC | |
| | ATTCACCATCTCCAGAGACAATTCC | | TGGCTCCAAGTCTGACAACACGGC | |
| | AAGAACACGCTGTATCTGCAAATGA | | CTCCCTGACCATCTCTGGGCTCCAG | |
| | ACAGCCTGAGAGCCGAGGACACGG | | GCTGAGGATGAGGCCGATTATTAT | |
| | CTGTGTATTACTGTGCGAGGATGCG | | TGTTGCTCATTTGCAGGCAGCTACA | |
| | TCCTGAATATTCCAGCGGGTTCGAC | | CTGTGTTCGGCGGAGGGACCAAAC | |
| | CCCTGGGGCCAGGGAACCCTGGTCA | | TGACCGTCCTGGGTCAGCCCAAGG | |
| | CCGTCTCCTCAGGGAGTGCATCCGC | | CTGCCCCCTCGGTCACTCTGTTCCC | |
| | CCCAACCCTTTTCCCCCTCGTCTCCT | | GCCCTCCTCTGAGGAGCTTCAAGC | |
| | GTGAGAATTCCCCGTCGGATACGAG | | CAACAAGGCCACACTGGTGTGTCT | |
| | CAGCGTG | | CATAAGTGACTTCTACCCGGGAGC | |
| | | | CGTGACAGTGGCCTGGAAGGCAGA | |
| | | | TGGCAGCCCCGTCAAGGTGGGAGT | |
| | | | GGAGACCACCAAACCCTCCAAACA | |
| | | | AAGCAACAACAAGTATGCGGCCAG | |
| | | | CAGCTACCTGAGCCTGACGCCCGA | |
| | | | GCAGTGGAAGTCCC | |
| S376-1721 | CAGGTGCAGTTGGTGCAGTCTGGGA | 2748 | CAGTCTGTGCTGACGCAGCCGCCC | 2797 |
| | CTGAGGTGAGGGAGCCTGGGGCCTC | | TCAGTGTCTGGGGCCCCAGGGCAG | |
| | AGTGAAAGTCTCCTGCAAGGCTTCT | | AGGGTCACCATCTCCTGCACTGGG | |
| | GGATACACCTTCACCGGCTACTATG | | AGCAGCTCCAACATCGGGGCAGGT | |
| | TGCACTGGGTGCGGCAGGCCCCTGG | | TATGATGTACACTGGTACCAGCAG | |
| | ACAAGGACTTGAGTGGATGGGCTGG | | CTTCCAGGAACAGCCCCCAAACTC | |
| | GTCAACCCTGGCAGTGGTGACACAC | | CTCATCTATGGTAACAGCAATCGG | |
| | TCTATGCACAGAAGTTTCAGGGCAG | | CCCTCAGGGGTCCCTGACCGATTCT | |
| | GTTCACCTTGACCAGGGACATGTCC | | CTGGCTCCAAGTCTGGCACCTCAG | |
| | ATCACCACCGCCTACATGGAGCTGA | | CCTCCCTGGCCATCACTGGGCTCCA | |
| | GCAGCCTGAGATCTGACGACTCGGC | | GGCTGAGGATGAGGCTGATTATTA | |
| | CGTTTATTTCTGTTTCCGTGGATACA | | CTGCCAGTCCTATGACAGCAGCCT | |
| | GCTATGCAACCTTTGACTACTGGGG | | GAGTGGTTCTTTTTATGTCTTCGGA | |
| | CCAGGGAACCCTGGTCACCGTCTCC | | ACTGGGACCAAGGTCACCGTCCTA | |
| | TCAGCATCCCCGACCAGCCCCAAGG | | GGTCAGCCCAAGGCCAACCCCACT | |
| | TCTTCCCGCTGAGCCTCTGCAGCAC | | GTCACTCTGTTCCCGCCCTCCTCTG | |
| | CCAGCCAGATGGGAACGTGGTCATC | | AGGAGCTTCAAGCCAACAAGGCCA | |
| | GCCTGCCTGGTCCAGGGCTTCTTCC | | CACTGGTGTGTCTCATAAGTGACTT | |
| | CCCAGGAGCCACTCAGTGTGACCTG | | CTACCCGGGAGCCGTGACAGTGGC | |
| | GAGCGAAAGCGGACAGGGCGTGAC | | CTGGAAGGCAGATAGCAGCCCCGT | |
| | CGCCAGAAACTTCCC | | CAAGGCGGGAGTGGAGACCACCAC | |
| | | | ACCCTCCAAACAAAGCAACAACAA | |
| | | | GTACGCGGCCAGCAGCTA | |
| S376-2486 | CAGGTGCAGCTGGTGGAGTCTGGGG | 2749 | GAAATTGTGTTGACGCAGTCTCCA | 2798 |
| | GAGGCGTGGTCCAGCCTGGGAGGTC | | GGCACCCTGTCTTTGTCTCCAGGGG | |
| | CCTGAGACTCTCCTGTGCAGTCTCT | | AAAGAGCCACCCTCTCCTGCAGGG | |
| | GGATTCACCTTCAGTAGCTATGCTA | | CCAGTCAGAGTGTTAGCCGCAACT | |
| | TGCACTGGGTCCGCCAGGCTCCAGG | | ACTTAGCCTGGTACCAGCAGAAAC | |
| | CAAGGGGCTGGAGTGGGTGGCAGTT | | CTGGCCAGGCTCCCAGGCTCCTCAT | |
| | ATATCATATGATGGAAGCAATAAAT | | CTATAGTGCATCCAGCAGGGCCAC | |
| | ACTTCGCAGACTCCGTGAAGGGCCG | | TGGCATCCCAGACAGGTTCAGTGG | |
| | ATTCACCATCTCCAGAGACAATTCC | | CAGTGGGTCTGGGACAGACTTCAC | |
| | AAGAACACGCTGTATCTGCAAATGA | | TCTCACCATCAGCAGACTGGAGCC | |
| | ACAGCCTGAGAGCTGAGGACACGG | | TGAAGATTTTGCAGTGTATTACTGT | |
| | CTGTCTATTACTGTGCGAGAGGACG | | CAGCAGTATGGTGGCTCACTCACTT | |
| | TGGGAACTACTTTACCTACTTTGACT | | TCGGCGGAGGGACCAAGGTGGAGA | |
| | ACTGGGGCCAGGGAACCCTGGTCAC | | TCAAACGAACTGTGGCTGCACCAT | |
| | CGTCTCCTCAGCCTCCACCAAGGGC | | CTGTCTTCATCTTCCCGCCATCTGA | |
| | CCATCGGTCTTCCCCCTGGCACCCTC | | TGAGCAGTTGAAATCTGGAACTGC | |
| | CTCCAAGAGCACCTCTGGGGGCACA | | CTCTGTTGTGTGCCTGCTGAATAAC | |
| | GCGGCCCTGGGCTGCCTGGTCAAGG | | TTCTATCCCAGAGAGGCCAAAGTA | |
| | ACTACTTCCCCGAACCGGTGACGGT | | CAGTGGAAGGTGGATAACGC | |
| | GTCGTGGAACTCAGGCGCCCTGACC | | | |
| | AGCGGCGTGCACACCTTCCCGGCTG | | | |
| | TCCTACAGTCCTCAGG | | | |
| S376-780 | CAGGTGCAGCTGGTGGAGTCTGGGG | 2750 | GACATCCAGATGACCCAGTCTCCA | 2799 |
| | GAGGCGTGGTCCAGCCTGGGAGGTC | | TCCTCCCTGTCTGCATCTGTAGGAG | |
| | CCTGAGACTCTCCTGTGCAGCCTCT | | ACAGAGTCACCATCACTTGCCGGG | |
| | GGATTCACCTTCAGTAGCTATGGCA | | CGAGTCAGGGCATTAGCAATTATT | |
| | TGCACTGGGTCCGCCAGGCTCCAGG | | TAGCCTGGTATCAGCAGAAACCAG | |
| | CAAGGGGCTGGAGTGGGTGGCAGTT | | GGAAAGTTCCTAAGCTCCTGATCT | |
| | ATATCATATGATGGAAGTAATAAAT | | ATGCTGCATCCACTTTGCAATCAGG | |
| | ACTATGCAGACTCCGTGAAGGGCCG | | GGTCCCATCTCGGTTCAGTGGCAGT | |
| | ATTCACCATCTCCAGAGACAATTCC | | GGATCTGGGACAGATTTCACTCTC | |
| | AAGAACACGCTGTATCTGCAAATGA | | ACCATCAGCAGCCTGCAGCCTGAA | |
| | ACAGCCTGAGAGCTGAGGACACGG | | GATGTTGCAACTTATTACTGTCAAA | |
| | CTGTGTATTACTGTGCGAAAGAGGG | | AGTATAACAGTGCCCCTCGGACTTT | |
| | TGGGAGCTACTCCTACTACTACTAC | | CGGCCCTGGGACCAAAGTGGATAT | |
| | GGTATGGACGTCTGGGGCCAAGGG | | CAAACGAACTGTGGCTGCACCATC | |
| | ACCACGGTCACCGTCTCCTCAGGGA | | TGTCTTCATCTTCCCGCCATCTGAT | |
| | GTGCATCCGCCCCAACCCTTTTCCCC | | GAGCAGTTGAAATCTGGAACTGCC | |
| | CTCGTCTCCTGTGAGAATTCCCCGTC | | TCTGTTGTGTGCCTGCTGAATAACT | |
| | GGATACGAGCAGCGTG | | TCTATCCCAGAGAGGCCAAAGTAC | |
| | | | AGTGGAAGGTGGATAACGC | |
| S469-373 | GAGGTGCAGTTGGTGGAGTCTGGGG | 2751 | GAGGTGCAGTTGGTGGAGTCTGGG | 2800 |
| | GAGGGTTGGTCCAGCCTGGGGGGTC | | GGAGGGTTGGTCCAGCCTGGGGGG | |
| | CCTGAGACTCTCCTGTGTAGTCTCTG | | TCCCTGAGACTCTCCTGTGTAGTCT | |
| | GATTCACCTTTAGTAGGTATTGGAT | | CTGGATTCACCTTTAGTAGGTATTG | |
| | GAGCTGGGTCCGCCAGACTCCAGGG | | GATGAGCTGGGTCCGCCAGACTCC | |
| | AAGGGGCTGCAGTGGGTGGCTAAC | | AGGGAAGGGGCTGCAGTGGGTGGC | |
| | ATAAAGCAAGATGACACTAACAAA | | TAACATAAAGCAAGATGACACTAA | |
| | TTCTATGAAGACTCTGTGAAGGGCC | | CAAATTCTATGAAGACTCTGTGAA | |
| | GATTCACCACCTCCAGAGACAACGC | | GGGCCGATTCACCACCTCCAGAGA | |
| | CAAGAACTCACTATATCTGCAAATG | | CAACGCCAAGAACTCACTATATCT | |
| | AACAGCCTGAGAGCCGAGGACACG | | GCAAATGAACAGCCTGAGAGCCGA | |
| | GCCGTCTATTACTGTGCGAGAGGGG | | GGACACGGCCGTCTATTACTGTGC | |
| | GGGGCAGCTCGTCCGGGCTCTACTT | | GAGAGGGGGGGGCAGCTCGTCCGG | |
| | TGAGTCCTGGGGCCAGGGAACCCTG | | GCTCTACTTTGAGTCCTGGGGCCAG | |
| | GTCATCGTCTCCTCAGGGAGTGCAT | | GGAACCCTGGTCATCGTCTCCTCAG | |
| | CCGCCCCAACCCTTTTCCCCCTCGTC | | GGAGTGCATCCGCCCCAACCCTTTT | |
| | TCCTGTGAGAATTCCCCGTCGGATA | | CCCCCTCGTCTCCTGTGAGAATTCC | |
| | CGAGCAGCGTG | | CCGTCGGATACGAGCAGCGTG | |
| S48-144 | GAGGTGCAGCTGGTGGAGTCTGGGG | 2752 | GACATCCAGATGACCCAGTCTCCA | 2801 |
| | GAGACTTGGTACAGCCAGGGCGGTC | | TCCTCCCTGTCTGCATCTGTAGGAG | |
| | CCTGAGACTCTCCTGTACAGCTTCT | | ACAGAGTCACCATCACTTGCCGGG | |
| | GCATTCAACTTTGGTGATTATGCTAT | | CAAGCCAGAGCATTAGCACCTTTTT | |
| | GAGCTGGGTCCGCCAGGCTCCAGGG | | AAATTGGTATCAGCAGAAACCAGG | |
| | AAGGGGCTGGAGTGGGTAGGTTTTA | | GAAAGCCCCTAGTCTCCTGATCTAT | |
| | TTAGAAGTAAAGGTTATGGTGGGAC | | GCTGCATCCAGTTTGCAAAGTGGG | |
| | AACAGAATACGCCGCGTCTGTGAAA | | GTCCCATCAAGGTTCAGTGGCAGT | |
| | GGCAGATTCACCATCTCAAGAGATG | | GAATCTGGGACAGATTTCACTCTC | |
| | ATTCCAATCGCATCGCCTATCTGCA | | ACCATCAGCAGTCTGCAACCTGAA | |
| | AATGAACAGCCTGAAATCCGAGGA | | GATTTTGCAACTTACTACTGTCAAC | |
| | CACAGCCGTATATTACTGTAGTAGA | | AGAGTTACAGTACCCCACTCACTTT | |
| | GGGTACCAGCTGCCAAACTTATGGG | | CGGCGGAGGGACCAAGGTGGAGAT | |
| | GCCAGGGAACCCTGGTCACCGTCTC | | CAAACGAACTGTGGCTGCACCATC | |
| | CTCAGCATCCCCGACCAGCCCCAAG | | TGTCTTCATCTTCCCGCCATCTGAT | |
| | GTCTTCCCGCTGAGCCTCTGCAGCA | | GAGCAGTTGAAATCTGGAACTGCC | |
| | CCCAGCCAGATGGGAACGTGGTCAT | | TCTGTTGTGTGCCTGCTGAATAACT | |
| | CGCCTGCCTGGTCCAGGGCTTCTTC | | TCTATCCCAGAGAGGCCAAAGTAC | |
| | CCCCAGGAGCCACTCAGTGTGACCT | | AGTGGAAGGTGGATAACGC | |
| | GGAGCGAAAGCGGACAGGGCGTGA | | | |
| | CCGCCAGAAACTTCCC | | | |
| 128 | GAGGTGCACCTGGTGGAGTCTGGGG | 2753 | GAAATAGTGATGACGCAGTCTCCA | 2802 |
| | GAGGCTGGGTCCAGCCTGGGGGGTC | | GCCACCCTGTCTGTGTCTCCAGGGG | |
| | CCTGAGACTCTCCTGTGCAGCCTCT | | AAAGAGCCACCCTCTCCTGCAGGG | |
| | GGATTCACCTTGAGTACCTATTGGA | | CCAGTCAGAGTATCAGCAGCAAAT | |
| | TGAGCTGGGTCCGCCAGACTCCAGG | | TAGCCTGGTACCAGCAGAAACCTG | |
| | GGAGGGGCTGCAGTGGGTGGCCAA | | GCCAGGCTCCCAGGCTCCTCATCTA | |
| | CATAAAGCAAGATGGAAGTTCGAA | | TGGTGCGTCCACCAGGGCCACTGG | |
| | ATACTATGTGGACTCTGTGAAGGGC | | TATCCCAGCCAGGTTCAGTGGCAG | |
| | CGATTCACCATTTCCAGGGACAACG | | TGGGTCTGGGACAGAATTCACTCT | |
| | CCAAGAACTCAGTATATCTGCAAAT | | CACCATCAGCAGCATGCAGTCTGA | |
| | GAACAGCCTGAGAGGCGAGGACAC | | AGATTTTGCAGTTTATTACTGTCAG | |
| | GGCTGTGTATTATTGTGCGAGAGGG | | CAGTATAATTACTGGTACACTTTTG | |
| | GATGGGAGCAATTCCGGGATTTATT | | GCCAGGGGACCAAGCTGGAGATCA | |
| | TTGACTCCTGGGGCCAGGGAACCCT | | AACGAACTGTGGCTGCACCATCTG | |
| | GGTCACCGTCTCTTCAGCCTCCACC | | TCTTCATCTTCCCGCCATCTGATGA | |
| | AAGGGCCCATCGGTCTTCCCCCTGG | | GCAGTTGAAATCTGGAACTGCCTC | |
| | CGCCCTGCTCCAGGAGCACCTCCGA | | TGTTGTGTGCCTGCTGAATAACTTC | |
| | GAGCACAGCGGCCCTGGGCTGCCTG | | TATCCCAGAGAGGCCAAAGTACAG | |
| | GTCAAGGACTACTTCCCCGAACCGG | | TGGAAGGTGGATAACGCCCTCCAA | |
| | TGACGGTGTCGTGGAACTCAGGCGC | | TCGGGTAACTCCCAGGAGAGTGTC | |
| | TCTGACCAGCGGCGTGCACACCTTC | | ACAGAGCAGGACAGCAAGGACAG | |
| | CCGGCTGTCCTACAGTCCTCAGGA | | CACCTACAGCCTCAGCAGCACCCT | |
| | | | GACGCTGAGCAAAGCAGACTACGA | |
| | | | GAA | |
| S92-110 | GAGGTGCAGCTGGTGGAGTCTGGGG | 2754 | TCTTCTGAGCTGACTCAGGACCCTG | 2803 |
| | GAGGCTTGGTACAGCCTGGAGGGTC | | CTGTGTCTGTGGCCTTGGGACAGA | |
| | CCTGAGACTCTCCTGTGCAGCCTCT | | CAGTCAGGATCACATGCCAAGGAG | |
| | GGATTCACCTTCAGTAGTTATGAAA | | ACAGCCTCAGAAGCTATTATGCAA | |
| | TGAACTGGGTCCGCCAGGCTCCAGG | | GCTGGTACCAGCAGAAGCCAGGAC | |
| | GAAGGGGCTGGAGTGGGTTTCATAC | | AGGCCCCTGTACTTGTCATCTATGG | |
| | ATTAGTAGTAGTGGTAGTACCATAT | | TAAAAACAACCGGCCCTCAGGGAT | |
| | ACTACGCAGACTCTGTGAAGGGCCG | | CCCAGACCGATTCTCTGGCTCCAGC | |
| | ATTCACCATCTCCAGAGACAACGCC | | TCAGGAAACACAGCTTCCTTGACC | |
| | AAGAACTCACTGTATCTGCAAATGA | | ATCACTGGGGCTCAGGCGGAAGAT | |
| | ACAGCCTGAGAGCCGAGGACACGG | | GAGGCTGACTATTACTGTAACTCCC | |
| | CTGTTTATTACTGTGCGAGAGATAG | | GGGACAGCAGTGGTAACCGGGTGT | |
| | ACGTGGGGACTACGGCCGGTACTAC | | TCGGCGGAGGGACCAAGCTGACCG | |
| | TACGGTATGGACGTCTGGGGCCAAG | | TCCTAGGTCAGCCCAAGGCTGCCC | |
| | GGACCACGGTCACCGTCTCCTCAGG | | CCTCGGTCACTCTGTTCCCACCCTC | |
| | GAGTGCATCCGCCCCAACCCTTTTC | | CTCTGAGGAGCTTCAAGCCAACAA | |
| | CCCCTCGTCTCCTGTGAGAATTCCCC | | GGCCACACTGGTGTGTCTCATAAG | |
| | GTCGGATACGAGCAGCGTG | | TGACTTCTACCCGGGAGCCGTGAC | |
| | | | AGTGGCCTGGAAGGCAGATAGCAG | |
| | | | CCCCGTCAAGGCGGGAGTGGAGAC | |
| | | | CACCACACCCTCCAAACAAAGCAA | |
| | | | CAACAAGTACGCGGCCAGCAGCTA | |
| S92-2329 | GAGGTGCAGCTGGTGGAGTCTGGGG | 2755 | GAAATTGTGTTGACACAGTCTCCA | 2804 |
| | GAGGCCTGGTCAAGCCTGGGGGGTC | | GCTACCCTGTCTTTGTCTCCAGGGG | |
| | CCTGAGACTCTCCTGTGCAGCCTCT | | AAAGAGCCACCCTCTCCTGCAGGG | |
| | GGATTCACCTTCAGTAGCTATAGCA | | CCAGTCAGAGTGTTAGCAGCTACT | |
| | TGAACTGGGTCCGCCAGGCTCCAGG | | TAGCCTGGTACCAACAGAAACCTG | |
| | GAAGGGGCTGGAGTGGGTCTCATCC | | GCCAGGCTCCCAGGCTCCTCATCTA | |
| | ATTAGTAGTAGTGGTACTTACATAT | | TGATGCATTCAACAGGGCCACTGG | |
| | ACTACGCAGACTCAGTGAAGGGCCG | | CATCCCAGCCAGGTTCAGTGGCAG | |
| | ATTCACCATCTCCAGAGACAACGCC | | TGGGTCTGGGACAGACTTCACTCTC | |
| | AAGAACTCACTGTATCTGCAAATGA | | ACCATCAGCAGCCTAGAGCCTGAA | |
| | ACAGCCTGAGAGTCGAGGACACGG | | GATTTTGCAGTTTATTACTGTCAGC | |
| | CTGTGTATTACTGTGCCCAAAGTAT | | AGCGTAGCAACTGGCCTCGCACTT | |
| | TGCAGCTCGTCTCGACTGGTTCGAC | | TCGGCGGAGGGACCAAGGTGGAGA | |
| | CCCTGGGGCCAGGGAACCCTGGTCA | | TCAAACGAACTGTGGCTGCACCAT | |
| | CCGTCTCCTCAGGGAGTGCATCCGC | | CTGTCTTCATCTTCCCGCCATCTGA | |
| | CCCAACCCTTTTCCCCCTCGTCTCCT | | TGAGCAGTTGAAATCTGGAACTGC | |
| | GTGAGAATTCCCCGTCGGATACGAG | | CTCTGTTGTGTGCCTGCTGAATAAC | |
| | CAGCGTG | | TTCTATCCCAGAGAGGCCAAAGTA | |
| | | | CAGTGGAAGGTGGATAACGC | |

TABLE 3
Summary of SEQ ID NOS.

| | HC | VH | HCDR1 | HCDR2 | HCDR3 | HFRW1 | HFRW2 | HFRW3 | HFRW4 |
|---|---|---|---|---|---|---|---|---|---|
| S20-15 | 1 | 2 | 3 | 4 | 5 | 6 | 7 | 8 | 9 |
| S20-22 | 19 | 20 | 21 | 22 | 23 | 24 | 25 | 26 | 27 |
| S20-31 | 37 | 38 | 39 | 40 | 41 | 42 | 43 | 44 | 45 |
| S20-40 | 55 | 56 | 57 | 58 | 59 | 60 | 61 | 62 | 63 |
| S20-58 | 73 | 74 | 75 | 76 | 77 | 78 | 79 | 80 | 81 |
| S20-74 | 91 | 92 | 93 | 94 | 95 | 96 | 97 | 98 | 99 |
| S20-86 | 109 | 110 | 111 | 112 | 113 | 114 | 115 | 116 | 117 |
| S24-68 | 127 | 128 | 129 | 130 | 131 | 132 | 133 | 134 | 135 |
| S24-105 | 145 | 146 | 147 | 148 | 149 | 150 | 151 | 152 | 153 |
| S24-178 | 163 | 164 | 165 | 166 | 167 | 168 | 169 | 170 | 171 |
| S24-188 | 181 | 182 | 183 | 184 | 185 | 186 | 187 | 188 | 189 |
| S24-202 | 199 | 200 | 201 | 202 | 203 | 204 | 205 | 206 | 207 |
| S24-278 | 217 | 218 | 219 | 220 | 221 | 222 | 223 | 224 | 225 |
| S24-339 | 235 | 236 | 237 | 238 | 239 | 240 | 241 | 242 | 243 |
| S24-472 | 253 | 254 | 255 | 256 | 257 | 258 | 259 | 260 | 261 |
| S24-490 | 271 | 272 | 273 | 274 | 275 | 276 | 277 | 278 | 279 |
| S24-494 | 289 | 290 | 291 | 292 | 293 | 294 | 295 | 296 | 297 |
| S24-566 | 307 | 308 | 309 | 310 | 311 | 312 | 313 | 314 | 315 |
| S24-636 | 325 | 326 | 327 | 328 | 329 | 330 | 331 | 332 | 333 |
| S24-740 | 343 | 344 | 345 | 346 | 347 | 348 | 349 | 350 | 351 |
| S24-791 | 361 | 362 | 363 | 364 | 365 | 366 | 367 | 368 | 369 |
| S24-902 | 379 | 380 | 381 | 382 | 383 | 384 | 385 | 386 | 387 |
| S24-921 | 397 | 398 | 399 | 400 | 401 | 402 | 403 | 404 | 405 |
| S24-1063 | 415 | 416 | 417 | 418 | 419 | 420 | 421 | 422 | 423 |
| S24-1224 | 433 | 434 | 435 | 436 | 437 | 438 | 439 | 440 | 441 |
| S24-1271 | 451 | 452 | 453 | 454 | 455 | 456 | 457 | 458 | 459 |
| S24-1339 | 469 | 470 | 471 | 472 | 473 | 474 | 475 | 476 | 477 |
| S24-1345 | 487 | 488 | 489 | 490 | 491 | 492 | 493 | 494 | 495 |
| S24-1378 | 505 | 506 | 507 | 508 | 509 | 510 | 511 | 512 | 513 |
| S24-1379 | 523 | 524 | 525 | 526 | 527 | 528 | 529 | 530 | 531 |
| S24-1384 | 541 | 542 | 543 | 544 | 545 | 546 | 547 | 548 | 549 |
| S24-1476 | 559 | 560 | 561 | 562 | 563 | 564 | 565 | 566 | 567 |
| S24-1564 | 577 | 578 | 579 | 580 | 581 | 582 | 583 | 584 | 585 |
| S24-1636 | 595 | 596 | 597 | 598 | 599 | 600 | 601 | 602 | 603 |
| S24-1002 | 613 | 614 | 615 | 616 | 617 | 618 | 619 | 620 | 621 |
| S24-1301 | 631 | 632 | 633 | 634 | 635 | 636 | 637 | 638 | 639 |
| S24-223 | 649 | 650 | 651 | 652 | 653 | 654 | 655 | 656 | 657 |
| S24-461 | 667 | 668 | 669 | 670 | 671 | 672 | 673 | 674 | 675 |
| S24-511 | 685 | 686 | 687 | 688 | 689 | 690 | 691 | 692 | 693 |
| S24-788 | 703 | 704 | 705 | 706 | 707 | 708 | 709 | 710 | 711 |
| S24-821 | 721 | 722 | 723 | 724 | 725 | 726 | 727 | 728 | 729 |
| S144-67 | 739 | 740 | 741 | 742 | 743 | 744 | 745 | 746 | 747 |
| S144-69 | 757 | 758 | 759 | 760 | 761 | 762 | 763 | 764 | 765 |
| S144-94 | 775 | 776 | 777 | 778 | 779 | 780 | 781 | 782 | 783 |
| S144-113 | 793 | 794 | 795 | 796 | 797 | 798 | 799 | 800 | 801 |
| S144-175 | 811 | 812 | 813 | 814 | 815 | 816 | 817 | 818 | 819 |
| S144-208 | 829 | 830 | 831 | 832 | 833 | 834 | 835 | 836 | 837 |
| S144-339 | 847 | 848 | 849 | 850 | 851 | 852 | 853 | 854 | 855 |
| S144-359 | 865 | 866 | 867 | 868 | 869 | 870 | 871 | 872 | 873 |
| S144-460 | 883 | 884 | 885 | 886 | 887 | 888 | 889 | 890 | 891 |
| S144-466 | 901 | 902 | 903 | 904 | 905 | 906 | 907 | 908 | 909 |
| S144-469 | 919 | 920 | 921 | 922 | 923 | 924 | 925 | 926 | 927 |
| S144-509 | 937 | 938 | 939 | 940 | 941 | 942 | 943 | 944 | 945 |
| S144-516 | 955 | 956 | 957 | 958 | 959 | 960 | 961 | 962 | 963 |
| S144-568 | 973 | 974 | 975 | 976 | 977 | 978 | 979 | 980 | 981 |
| S144-576 | 991 | 992 | 993 | 994 | 995 | 996 | 997 | 998 | 999 |
| S144-588 | 1009 | 1010 | 1011 | 1012 | 1013 | 1014 | 1015 | 1016 | 1017 |
| S144-628 | 1027 | 1028 | 1029 | 1030 | 1031 | 1032 | 1033 | 1034 | 1035 |
| S144-740 | 1045 | 1046 | 1047 | 1048 | 1049 | 1050 | 1051 | 1052 | 1053 |
| S144-741 | 1063 | 1064 | 1065 | 1066 | 1067 | 1068 | 1069 | 1070 | 1071 |
| S144-803 | 1081 | 1082 | 1083 | 1084 | 1085 | 1086 | 1087 | 1088 | 1089 |
| S144-843 | 1099 | 1100 | 1101 | 1102 | 1103 | 1104 | 1105 | 1106 | 1107 |
| S144-877 | 1117 | 1118 | 1119 | 1120 | 1121 | 1122 | 1123 | 1124 | 1125 |
| S144-952 | 1135 | 1136 | 1137 | 1138 | 1139 | 1140 | 1141 | 1142 | 1143 |
| S144-971 | 1153 | 1154 | 1155 | 1156 | 1157 | 1158 | 1159 | 1160 | 1161 |
| S144-1036 | 1171 | 1172 | 1173 | 1174 | 1175 | 1176 | 1177 | 1178 | 1179 |
| S144-1079 | 1189 | 1190 | 1191 | 1192 | 1193 | 1194 | 1195 | 1196 | 1197 |
| S144-1299 | 1207 | 1208 | 1209 | 1210 | 1211 | 1212 | 1213 | 1214 | 1215 |
| S144-1339 | 1225 | 1226 | 1227 | 1228 | 1229 | 1230 | 1231 | 1232 | 1233 |
| S144-1406 | 1243 | 1244 | 1245 | 1246 | 1247 | 1248 | 1249 | 1250 | 1251 |
| S144-1407 | 1261 | 1262 | 1263 | 1264 | 1265 | 1266 | 1267 | 1268 | 1269 |
| S144-1569 | 1279 | 1280 | 1281 | 1282 | 1283 | 1284 | 1285 | 1286 | 1287 |
| S144-1641 | 1297 | 1298 | 1299 | 1300 | 1301 | 1302 | 1303 | 1304 | 1305 |
| S144-1827 | 1315 | 1316 | 1317 | 1318 | 1319 | 1320 | 1321 | 1322 | 1323 |
| S144-1848 | 1333 | 1334 | 1335 | 1336 | 1337 | 1338 | 1339 | 1340 | 1341 |
| S144-1850 | 1351 | 1352 | 1353 | 1354 | 1355 | 1356 | 1357 | 1358 | 1359 |
| S144-2234 | 1369 | 1370 | 1371 | 1372 | 1373 | 1374 | 1375 | 1376 | 1377 |
| S564-105 | 1387 | 1388 | 1389 | 1390 | 1391 | 1392 | 1393 | 1394 | 1395 |
| S564-14 | 1405 | 1406 | 1407 | 1408 | 1409 | 1410 | 1411 | 1412 | 1413 |
| S564-68 | 1423 | 1424 | 1425 | 1426 | 1427 | 1428 | 1429 | 1430 | 1431 |
| S564-98 | 1441 | 1442 | 1443 | 1444 | 1445 | 1446 | 1447 | 1448 | 1449 |
| S564-105 | 1459 | 1460 | 1461 | 1462 | 1463 | 1464 | 1465 | 1466 | 1467 |
| S564-134 | 1477 | 1478 | 1479 | 1480 | 1481 | 1482 | 1483 | 1484 | 1485 |
| S564-138 | 1495 | 1496 | 1497 | 1498 | 1499 | 1500 | 1501 | 1502 | 1503 |
| S564-152 | 1513 | 1514 | 1515 | 1516 | 1517 | 1518 | 1519 | 1520 | 1521 |
| S564-218 | 1531 | 1532 | 1533 | 1534 | 1535 | 1536 | 1537 | 1538 | 1539 |
| S564-249 | 1549 | 1550 | 1551 | 1552 | 1553 | 1554 | 1555 | 1556 | 1557 |
| S564-265 | 1567 | 1568 | 1569 | 1570 | 1571 | 1572 | 1573 | 1574 | 1575 |
| S564-275 | 1585 | 1586 | 1587 | 1588 | 1589 | 1590 | 1591 | 1592 | 1593 |
| S564-287 | 1603 | 1604 | 1605 | 1606 | 1607 | 1608 | 1609 | 1610 | 1611 |
| S116-2822 | 1825 | 1826 | 1827 | 1828 | 1829 | 1830 | 1831 | 1832 | 1833 |
| S116-2825 | 1843 | 1844 | 1845 | 1846 | 1847 | 1848 | 1849 | 1850 | 1851 |
| S116-3179 | 1861 | 1862 | 1863 | 1864 | 1865 | 1866 | 1867 | 1868 | 1869 |
| S144-121 | 1879 | 1880 | 1881 | 1882 | 1883 | 1884 | 1885 | 1886 | 1887 |
| S144-1364 | 1897 | 1898 | 1899 | 1900 | 1901 | 1902 | 1903 | 1904 | 1905 |
| S144-292 | 1915 | 1916 | 1917 | 1918 | 1919 | 1920 | 1921 | 1922 | 1923 |
| S155-37 | 1933 | 1934 | 1935 | 1936 | 1937 | 1938 | 1939 | 1940 | 1941 |
| S166-1318 | 1951 | 1952 | 1953 | 1954 | 1955 | 1956 | 1957 | 1958 | 1959 |
| S166-1366 | 1969 | 1970 | 1971 | 1972 | 1973 | 1974 | 1975 | 1976 | 1977 |
| S166-2395 | 1987 | 1988 | 1989 | 1990 | 1991 | 1992 | 1993 | 1994 | 1995 |
| S166-2620 | 2005 | 2006 | 2007 | 2008 | 2009 | 2010 | 2011 | 2012 | 2013 |
| S166-32 | 2023 | 2024 | 2025 | 2026 | 2027 | 2028 | 2029 | 2030 | 2031 |
| S171-1150 | 2041 | 2042 | 2043 | 2044 | 2045 | 2046 | 2047 | 2048 | 2049 |
| S171-1285 | 2059 | 2060 | 2061 | 2062 | 2063 | 2064 | 2065 | 2066 | 2067 |
| S171-692 | 2077 | 2078 | 2079 | 2080 | 2081 | 2082 | 2083 | 2084 | 2085 |
| S179-122 | 2095 | 2096 | 2097 | 2098 | 2099 | 2100 | 2101 | 2102 | 2103 |
| S179-20 | 2113 | 2114 | 2115 | 2116 | 2117 | 2118 | 2119 | 2120 | 2121 |
| S179-27 | 2131 | 2132 | 2133 | 2134 | 2135 | 2136 | 2137 | 2138 | 2139 |
| S179-28 | 2149 | 2150 | 2151 | 2152 | 2153 | 2154 | 2155 | 2156 | 2157 |
| S210-1139 | 2167 | 2168 | 2169 | 2170 | 2171 | 2172 | 2173 | 2174 | 2175 |
| S210-1262 | 2185 | 2186 | 2187 | 2188 | 2189 | 2190 | 2191 | 2192 | 2193 |
| S210-1611 | 2203 | 2204 | 2205 | 2206 | 2207 | 2208 | 2209 | 2210 | 2211 |
| S210-727 | 2221 | 2222 | 2223 | 2224 | 2225 | 2226 | 2227 | 2228 | 2229 |
| S210-852 | 2239 | 2240 | 2241 | 2242 | 2243 | 2244 | 2245 | 2246 | 2247 |
| S210-896 | 2257 | 2258 | 2259 | 2260 | 2261 | 2262 | 2263 | 2264 | 2265 |
| S2141-113 | 2275 | 2276 | 2277 | 2278 | 2279 | 2280 | 2281 | 2282 | 2283 |
| S2141-126 | 2293 | 2294 | 2295 | 2296 | 2297 | 2298 | 2299 | 2300 | 2301 |
| S2141-16 | 2311 | 2312 | 2313 | 2314 | 2315 | 2316 | 2317 | 2318 | 2319 |
| S2141-62 | 2329 | 2330 | 2331 | 2332 | 2333 | 2334 | 2335 | 2336 | 2337 |
| S2141-63 | 2347 | 2348 | 2349 | 2350 | 2351 | 2352 | 2353 | 2354 | 2355 |
| S2141-65 | 2365 | 2366 | 2367 | 2368 | 2369 | 2370 | 2371 | 2372 | 2373 |
| S2141-97 | 2383 | 2384 | 2385 | 2386 | 2387 | 2388 | 2389 | 2390 | 2391 |
| S24_342 | 2401 | 2402 | 2403 | 2404 | 2405 | 2406 | 2407 | 2408 | 2409 |
| S24-1047 | 2419 | 2420 | 2421 | 2422 | 2423 | 2424 | 2425 | 2426 | 2427 |
| S24-223 | 2437 | 2438 | 2439 | 2440 | 2441 | 2442 | 2443 | 2444 | 2445 |
| S24-237 | 2455 | 2456 | 2457 | 2458 | 2459 | 2460 | 246 | 2462 | 2463 |
| S305-1456 | 2473 | 2474 | 2475 | 2476 | 2477 | 2478 | 2479 | 2480 | 2481 |
| S305-223 | 2491 | 2492 | 2493 | 2494 | 2495 | 2496 | 2497 | 2498 | 2499 |
| S305-399 | 2509 | 2510 | 2511 | 2512 | 2513 | 2514 | 2515 | 2516 | 2517 |
| S305-968 | 2527 | 2528 | 2529 | 2530 | 2531 | 2532 | 2533 | 2534 | 2535 |
| S376-1070 | 2545 | 2546 | 2547 | 2548 | 2549 | 2550 | 2551 | 2552 | 2553 |
| S376-1721 | 2563 | 2564 | 2565 | 2566 | 2567 | 2568 | 2569 | 2570 | 2571 |
| S376-2486 | 2581 | 2582 | 2583 | 2584 | 2585 | 2586 | 2587 | 2588 | 2589 |
| S376-780 | 2599 | 2600 | 2601 | 2602 | 2603 | 2604 | 2605 | 2606 | 2607 |
| S469-373 | 2617 | 2618 | 2619 | 2620 | 2621 | 2622 | 2623 | 2624 | 2625 |
| S48-144 | 2635 | 2636 | 2637 | 2638 | 2639 | 2640 | 2641 | 2642 | 2643 |
| S564-128 | 2653 | 2654 | 2655 | 2656 | 2657 | 2658 | 2659 | 2660 | 2661 |
| S92-110 | 2671 | 2672 | 2673 | 2674 | 2675 | 2676 | 2677 | 2678 | 2679 |
| S92-2329 | 2689 | 2690 | 2691 | 2692 | 2693 | 2694 | 2695 | 2696 | 2697 |
| | LC | VL | LCDR1 | LCDR2 | LCDR3 | LFRW1 | LFRW2 | LFRW3 | LFRW4 |
| S20-15 | 10 | 11 | 12 | 13 | 14 | 15 | 16 | 17 | 18 |
| S20-22 | 28 | 29 | 30 | 31 | 32 | 33 | 34 | 35 | 36 |
| S20-31 | 46 | 47 | 48 | 49 | 50 | 51 | 52 | 53 | 54 |
| S20-40 | 64 | 65 | 66 | 67 | 68 | 69 | 70 | 71 | 72 |
| S20-58 | 82 | 83 | 84 | 85 | 86 | 87 | 88 | 89 | 90 |
| S20-74 | 100 | 101 | 102 | 103 | 104 | 105 | 106 | 107 | 108 |
| S20-86 | 118 | 119 | 120 | 121 | 122 | 123 | 124 | 125 | 126 |
| S24-68 | 136 | 137 | 138 | 139 | 140 | 141 | 142 | 143 | 144 |
| S24-105 | 154 | 155 | 156 | 157 | 158 | 159 | 160 | 161 | 162 |
| S24-178 | 172 | 173 | 174 | 175 | 176 | 177 | 178 | 179 | 180 |
| S24-188 | 190 | 191 | 192 | 193 | 194 | 195 | 196 | 197 | 198 |
| S24-202 | 208 | 209 | 210 | 211 | 212 | 213 | 214 | 215 | 216 |
| S24-278 | 226 | 227 | 228 | 229 | 230 | 231 | 232 | 233 | 234 |
| S24-339 | 244 | 245 | 246 | 247 | 248 | 249 | 250 | 251 | 252 |
| S24-472 | 262 | 263 | 264 | 265 | 266 | 267 | 268 | 269 | 270 |
| S24-490 | 280 | 281 | 282 | 283 | 284 | 285 | 286 | 287 | 288 |
| S24-494 | 298 | 299 | 300 | 301 | 302 | 303 | 304 | 305 | 306 |
| S24-566 | 316 | 317 | 318 | 319 | 320 | 321 | 322 | 323 | 324 |
| S24-636 | 334 | 335 | 336 | 337 | 338 | 339 | 340 | 341 | 342 |
| S24-740 | 352 | 353 | 354 | 355 | 356 | 357 | 358 | 359 | 360 |
| S24-791 | 370 | 371 | 372 | 373 | 374 | 375 | 376 | 377 | 378 |
| S24-902 | 388 | 389 | 390 | 391 | 392 | 393 | 394 | 395 | 396 |
| S24-921 | 406 | 407 | 408 | 409 | 410 | 411 | 412 | 413 | 414 |
| S24-1063 | 424 | 425 | 426 | 427 | 428 | 429 | 430 | 431 | 432 |
| S24-1224 | 442 | 443 | 444 | 445 | 446 | 447 | 448 | 449 | 450 |
| S24-1271 | 460 | 461 | 462 | 463 | 464 | 465 | 466 | 467 | 468 |
| S24-1339 | 478 | 479 | 480 | 481 | 482 | 483 | 484 | 485 | 486 |
| S24-1345 | 496 | 497 | 498 | 499 | 500 | 501 | 502 | 503 | 504 |
| S24-1378 | 514 | 515 | 516 | 517 | 518 | 519 | 520 | 521 | 522 |
| S24-1379 | 532 | 533 | 534 | 535 | 536 | 537 | 538 | 539 | 540 |
| S24-1384 | 550 | 551 | 552 | 553 | 554 | 555 | 556 | 557 | 558 |
| S24-1476 | 568 | 569 | 570 | 571 | 572 | 573 | 574 | 575 | 576 |
| S24-1564 | 586 | 587 | 588 | 589 | 590 | 591 | 592 | 593 | 594 |
| S24-1636 | 604 | 605 | 606 | 607 | 608 | 609 | 610 | 611 | 612 |
| S24-1002 | 622 | 623 | 624 | 625 | 626 | 627 | 628 | 629 | 630 |
| S24-1301 | 640 | 641 | 642 | 643 | 644 | 645 | 646 | 647 | 648 |
| S24-223 | 658 | 659 | 660 | 661 | 662 | 663 | 664 | 665 | 666 |
| S24-461 | 676 | 677 | 678 | 679 | 680 | 681 | 682 | 683 | 684 |
| S24-511 | 694 | 695 | 696 | 697 | 698 | 699 | 700 | 701 | 702 |
| S24-788 | 712 | 713 | 714 | 715 | 716 | 717 | 718 | 719 | 720 |
| S24-821 | 730 | 731 | 732 | 733 | 734 | 735 | 736 | 737 | 738 |
| S144-67 | 748 | 749 | 750 | 751 | 752 | 753 | 754 | 755 | 756 |
| S144-69 | 766 | 767 | 768 | 769 | 770 | 771 | 772 | 773 | 774 |
| S144-94 | 784 | 785 | 786 | 787 | 788 | 789 | 790 | 791 | 792 |
| S144-113 | 802 | 803 | 804 | 805 | 806 | 807 | 808 | 809 | 810 |
| S144-175 | 820 | 821 | 822 | 823 | 824 | 825 | 826 | 827 | 828 |
| S144-208 | 838 | 839 | 840 | 841 | 842 | 843 | 844 | 845 | 846 |
| S144-339 | 856 | 857 | 858 | 859 | 860 | 861 | 862 | 863 | 864 |
| S144-359 | 874 | 875 | 876 | 877 | 878 | 879 | 880 | 881 | 882 |
| S144-460 | 892 | 893 | 894 | 895 | 896 | 897 | 898 | 899 | 900 |
| S144-466 | 910 | 911 | 912 | 913 | 914 | 915 | 916 | 917 | 918 |
| S144-469 | 928 | 929 | 930 | 931 | 932 | 933 | 934 | 935 | 936 |
| S144-509 | 946 | 947 | 948 | 949 | 950 | 951 | 952 | 953 | 954 |
| S144-516 | 964 | 965 | 966 | 967 | 968 | 969 | 970 | 971 | 972 |
| S144-568 | 982 | 983 | 984 | 985 | 986 | 987 | 988 | 989 | 990 |
| S144-576 | 1000 | 1001 | 1002 | 1003 | 1004 | 1005 | 1006 | 1007 | 1008 |
| S144-588 | 1018 | 1019 | 1020 | 1021 | 1022 | 1023 | 1024 | 1025 | 1026 |
| S144-628 | 1036 | 1037 | 1038 | 1039 | 1040 | 1041 | 1042 | 1043 | 1044 |
| S144-740 | 1054 | 1055 | 1056 | 1057 | 1058 | 1059 | 1060 | 1061 | 1062 |
| S144-741 | 1072 | 1073 | 1074 | 1075 | 1076 | 1077 | 1078 | 1079 | 1080 |
| S144-803 | 1090 | 1091 | 1092 | 1093 | 1094 | 1095 | 1096 | 1097 | 1098 |
| S144-843 | 1108 | 1109 | 1110 | 1111 | 1112 | 1113 | 1114 | 1115 | 1116 |
| S144-877 | 1126 | 1127 | 1128 | 1129 | 1130 | 1131 | 1132 | 1133 | 1134 |
| S144-952 | 1144 | 1145 | 1146 | 1147 | 1148 | 1149 | 1150 | 1151 | 1152 |
| S144-971 | 1162 | 1163 | 1164 | 1165 | 1166 | 1167 | 1168 | 1169 | 1170 |
| S144-1036 | 1180 | 1181 | 1182 | 1183 | 1184 | 1185 | 1186 | 1187 | 1188 |
| S144-1079 | 1198 | 1199 | 1200 | 1201 | 1202 | 1203 | 1204 | 1205 | 1206 |
| S144-1299 | 1216 | 1217 | 1218 | 1219 | 1220 | 1221 | 1222 | 1223 | 1224 |
| S144-1339 | 1234 | 1235 | 1236 | 1237 | 1238 | 1239 | 1240 | 1241 | 1242 |
| S144-1406 | 1252 | 1253 | 1254 | 1255 | 1256 | 1257 | 1258 | 1259 | 1260 |
| S144-1407 | 1270 | 1271 | 1272 | 1273 | 1274 | 1275 | 1276 | 1277 | 1278 |
| S144-1569 | 1288 | 1289 | 1290 | 1291 | 1292 | 1293 | 1294 | 1295 | 1296 |
| S144-1641 | 1306 | 1307 | 1308 | 1309 | 1310 | 1311 | 1312 | 1313 | 1314 |
| S144-1827 | 1324 | 1325 | 1326 | 1327 | 1328 | 1329 | 1330 | 1331 | 1332 |
| S144-1848 | 1342 | 1343 | 1344 | 1345 | 1346 | 1347 | 1348 | 1349 | 1350 |
| S144-1850 | 1360 | 1361 | 1362 | 1363 | 1364 | 1365 | 1366 | 1367 | 1368 |
| S144-2234 | 1378 | 1379 | 1380 | 1381 | 1382 | 1383 | 1384 | 1385 | 1386 |
| S564-105 | 1396 | 1397 | 1398 | 1399 | 1400 | 1401 | 1402 | 1403 | 1404 |
| S564-14 | 1414 | 1415 | 1416 | 1417 | 1418 | 1419 | 1420 | 1421 | 1422 |
| S564-68 | 1432 | 1433 | 1434 | 1435 | 1436 | 1437 | 1438 | 1439 | 1440 |
| S564-98 | 1450 | 1451 | 1452 | 1453 | 1454 | 1455 | 1456 | 1457 | 1458 |
| S564-105 | 1468 | 1469 | 1470 | 1471 | 1472 | 1473 | 1474 | 1475 | 1476 |
| S564-134 | 1486 | 1487 | 1488 | 1489 | 1490 | 1491 | 1492 | 1493 | 1494 |
| S564-138 | 1504 | 1505 | 1506 | 1507 | 1508 | 1509 | 1510 | 1511 | 1512 |
| S564-152 | 1522 | 1523 | 1524 | 1525 | 1526 | 1527 | 1528 | 1529 | 1530 |
| S564-218 | 1540 | 1541 | 1542 | 1543 | 1544 | 1545 | 1546 | 1547 | 1548 |
| S564-249 | 1558 | 1559 | 1560 | 1561 | 1562 | 1563 | 1564 | 1565 | 1566 |
| S564-265 | 1576 | 1577 | 1578 | 1579 | 1580 | 1581 | 1582 | 1583 | 1584 |
| S564-275 | 1594 | 1595 | 1596 | 1597 | 1598 | 1599 | 1600 | 1601 | 1602 |
| S564-287 | 1612 | 1613 | 1614 | 1615 | 1616 | 1617 | 1618 | 1619 | 1620 |
| S116-2822 | 1834 | 1835 | 1836 | 1837 | 1838 | 1839 | 1840 | 1841 | 1842 |
| S116-2825 | 1852 | 1853 | 1854 | 1855 | 1856 | 1857 | 1858 | 1859 | 1860 |
| S116-3179 | 1870 | 1871 | 187 | 1873 | 1874 | 1875 | 1876 | 1877 | 1878 |
| S144-121 | 1888 | 1889 | 1890 | 1891 | 1892 | 1893 | 1894 | 1895 | 1896 |
| S144-1364 | 1906 | 1907 | 1908 | 1909 | 1910 | 1911 | 1912 | 1913 | 1914 |
| S144-292 | 1924 | 1925 | 1926 | 1927 | 1928 | 1929 | 1930 | 1931 | 1932 |
| S155-37 | 1942 | 1943 | 1944 | 1945 | 1946 | 1947 | 1948 | 1949 | 1950 |
| S166-1318 | 1960 | 1961 | 1962 | 1963 | 1964 | 1965 | 1966 | 1967 | 1968 |
| S166-1366 | 1978 | 1979 | 1980 | 1981 | 1982 | 1983 | 1984 | 1985 | 1986 |
| S166-2395 | 1996 | 1997 | 1998 | 1999 | 2000 | 2001 | 2002 | 2003 | 2004 |
| S166-2620 | 2014 | 2015 | 2016 | 2017 | 2018 | 2019 | 2020 | 2021 | 2022 |
| S166-32 | 2032 | 2033 | 2034 | 2035 | 2036 | 2037 | 2038 | 2039 | 2040 |
| S171-1150 | 2050 | 2051 | 2052 | 2053 | 2054 | 2055 | 2056 | 2057 | 2058 |
| S171-1285 | 2068 | 2069 | 2070 | 2071 | 2072 | 2073 | 2074 | 2075 | 2076 |
| S171-692 | 2086 | 2087 | 2088 | 2089 | 2090 | 2091 | 2092 | 2093 | 2094 |
| S179-122 | 2104 | 2105 | 2106 | 2107 | 2108 | 2109 | 2110 | 2111 | 2112 |
| S179-20 | 2122 | 2123 | 2124 | 2125 | 2126 | 2127 | 2128 | 2129 | 2130 |
| S179-27 | 2140 | 2141 | 2142 | 2143 | 2144 | 2145 | 2146 | 2147 | 2148 |
| S179-28 | 2158 | 2159 | 2160 | 2161 | 2162 | 2163 | 2164 | 2165 | 2166 |
| S210-1139 | 2176 | 2177 | 2178 | 2179 | 2180 | 2181 | 2182 | 2183 | 2184 |
| S210-1262 | 2194 | 2195 | 2196 | 2197 | 2198 | 2199 | 2200 | 2201 | 2202 |
| S210-1611 | 2212 | 2213 | 2214 | 2215 | 2216 | 2217 | 2218 | 2219 | 2220 |
| S210-727 | 2230 | 2231 | 2232 | 2233 | 2234 | 2235 | 2236 | 2237 | 2238 |
| S210-852 | 2248 | 2249 | 2250 | 2251 | 2252 | 2253 | 2254 | 2255 | 2256 |
| S210-896 | 2266 | 2267 | 2268 | 2269 | 2270 | 2271 | 2272 | 2273 | 2274 |
| S2141-113 | 2284 | 2285 | 2286 | 2287 | 2288 | 2289 | 2290 | 2291 | 2292 |
| S2141-126 | 2302 | 2303 | 2304 | 2305 | 2306 | 2307 | 2308 | 2309 | 2310 |
| S2141-16 | 2320 | 2321 | 2322 | 2323 | 2324 | 2325 | 2326 | 2327 | 2328 |
| S2141-62 | 2338 | 2339 | 2340 | 2341 | 2342 | 2343 | 2344 | 2345 | 2346 |
| S2141-63 | 2356 | 2357 | 2358 | 2359 | 2360 | 2361 | 2362 | 2363 | 2364 |
| S2141-65 | 2374 | 2375 | 2376 | 2377 | 2378 | 2379 | 2380 | 2381 | 2382 |
| S2141-97 | 2392 | 2393 | 2394 | 2395 | 2396 | 2397 | 2398 | 2399 | 2400 |
| S24_342 | 2410 | 2411 | 2412 | 2413 | 2414 | 2415 | 2416 | 2417 | 2418 |
| S24-1047 | 2428 | 2429 | 2430 | 2431 | 2432 | 2433 | 2434 | 2435 | 2436 |
| S24-223 | 2446 | 2447 | 2448 | 2449 | 2450 | 2451 | 2452 | 2453 | 2454 |
| S24-237 | 2464 | 2465 | 2466 | 2467 | 2468 | 2469 | 2470 | 2471 | 2472 |
| S305-1456 | 2482 | 2483 | 2484 | 2485 | 2486 | 2487 | 2488 | 2489 | 2490 |
| S305-223 | 2500 | 2501 | 2502 | 2503 | 2504 | 2505 | 2506 | 2507 | 2508 |
| S305-399 | 2518 | 2519 | 2520 | 2521 | 2522 | 2523 | 2524 | 2525 | 2526 |
| S305-968 | 2536 | 2537 | 2538 | 2539 | 2540 | 2541 | 2542 | 2543 | 2544 |
| S376-1070 | 2554 | 2555 | 2556 | 2557 | 2558 | 2559 | 2560 | 2561 | 2562 |
| S376-1721 | 2572 | 2573 | 2574 | 2575 | 2576 | 2577 | 2578 | 2579 | 2580 |
| S376-2486 | 2590 | 2591 | 2592 | 2593 | 2594 | 2595 | 2596 | 2597 | 2598 |
| S376-780 | 2608 | 2609 | 2610 | 2611 | 2612 | 2613 | 2614 | 2615 | 2616 |
| S469-373 | 2626 | 2627 | 2628 | 2629 | 2630 | 2631 | 2632 | 2633 | 2634 |
| S48-144 | 2644 | 2645 | 2646 | 2647 | 2648 | 2649 | 2650 | 2651 | 2652 |
| S564-128 | 2662 | 2663 | 2664 | 2665 | 2666 | 2667 | 2668 | 2669 | 2670 |
| S92-110 | 2680 | 2681 | 2682 | 2683 | 2684 | 2685 | 2686 | 2687 | 2688 |
| S92-2329 | 2698 | 2699 | 2700 | 2701 | 2702 | 2703 | 2704 | 2705 | 2706 |

[0335] 1. Variant Polypeptides

[0336] The following is a discussion of changing the amino acid subunits of a protein to create an equivalent, or even improved, second-generation variant polypeptide or peptide. For example, certain amino acids may be substituted for other amino acids in a protein or polypeptide sequence with or without appreciable loss of interactive binding capacity with structures such as, for example, antigen-binding regions of antibodies or binding sites on substrate molecules. Since it is the interactive capacity and nature of a protein that defines that protein's functional activity, certain amino acid substitutions can be made in a protein sequence and in its corresponding DNA coding sequence, and nevertheless produce a protein with similar or desirable properties. It is thus contemplated by the inventors that various changes may be made in the DNA sequences of genes which encode proteins without appreciable loss of their biological utility or activity.

[0337] The term “functionally equivalent codon” is used herein to refer to codons that encode the same amino acid, such as the six different codons for arginine. Also considered are “neutral substitutions” or “neutral mutations” which refers to a change in the codon or codons that encode biologically equivalent amino acids.

[0338] Amino acid sequence variants of the disclosure can be substitutional, insertional, or deletion variants. A variation in a polypeptide of the disclosure may affect 1, 2, 3, 4, 5, 6, 7, 8, 9, 10, 11, 12, 13, 14, 15, 16, 17, 18, 19, 20, 21, 22, 23, 24, 25, 26, 27, 28, 29, 30, 31, 32, 33, 34, 35, 36, 37, 38, 39, 40, 41, 42, 43, 44, 45, 46, 47, 48, 49, 50, or more non-contiguous or contiguous amino acids of the protein or polypeptide, as compared to wild-type. A variant can comprise an amino acid sequence that is at least 50%, 60%, 70%, 80%, or 90%, including all values and ranges there between, identical to any sequence provided or referenced herein. A variant can include 2, 3, 4, 5, 6, 7, 8, 9, 10, 11, 12, 13, 14, 15, 16, 17, 18, 19, 20, or more substitute amino acids.

[0339] It also will be understood that amino acid and nucleic acid sequences may include additional residues, such as additional N- or C-terminal amino acids, or 5′ or 3′ sequences, respectively, and yet still be essentially identical as set forth in one of the sequences disclosed herein, so long as the sequence meets the criteria set forth above, including the maintenance of biological protein activity where protein expression is concerned. The addition of terminal sequences particularly applies to nucleic acid sequences that may, for example, include various non-coding sequences flanking either of the 5′ or 3′ portions of the coding region.

[0340] Deletion variants typically lack one or more residues of the native or wild type protein. Individual residues can be deleted or a number of contiguous amino acids can be deleted. A stop codon may be introduced (by substitution or insertion) into an encoding nucleic acid sequence to generate a truncated protein.

[0341] Insertional mutants typically involve the addition of amino acid residues at a non-terminal point in the polypeptide. This may include the insertion of one or more amino acid residues. Terminal additions may also be generated and can include fusion proteins which are multimers or concatemers of one or more peptides or polypeptides described or referenced herein.

[0342] Substitutional variants typically contain the exchange of one amino acid for another at one or more sites within the protein or polypeptide, and may be designed to modulate one or more properties of the polypeptide, with or without the loss of other functions or properties. Substitutions may be conservative, that is, one amino acid is replaced with one of similar chemical properties. “Conservative amino acid substitutions” may involve exchange of a member of one amino acid class with another member of the same class. Conservative substitutions are well known in the art and include, for example, the changes of: alanine to serine; arginine to lysine; asparagine to glutamine or histidine; aspartate to glutamate; cysteine to serine; glutamine to asparagine; glutamate to aspartate; glycine to proline; histidine to asparagine or glutamine; isoleucine to leucine or valine; leucine to valine or isoleucine; lysine to arginine; methionine to leucine or isoleucine; phenylalanine to tyrosine, leucine or methionine; serine to threonine; threonine to serine; tryptophan to tyrosine; tyrosine to tryptophan or phenylalanine; and valine to isoleucine or leucine. Conservative amino acid substitutions may encompass non-naturally occurring amino acid residues, which are typically incorporated by chemical peptide synthesis rather than by synthesis in biological systems. These include peptidomimetics or other reversed or inverted forms of amino acid moieties.

[0343] Alternatively, substitutions may be “non-conservative”, such that a function or activity of the polypeptide is affected. Non-conservative changes typically involve substituting an amino acid residue with one that is chemically dissimilar, such as a polar or charged amino acid for a nonpolar or uncharged amino acid, and vice versa. Non-conservative substitutions may involve the exchange of a member of one of the amino acid classes for a member from another class.

[0344] 2. Considerations for Substitutions

[0345] One skilled in the art can determine suitable variants of polypeptides as set forth herein using well-known techniques. One skilled in the art may identify suitable areas of the molecule that may be changed without destroying activity by targeting regions not believed to be important for activity. The skilled artisan will also be able to identify amino acid residues and portions of the molecules that are conserved among similar proteins or polypeptides. In further embodiments, areas that may be important for biological activity or for structure may be subject to conservative amino acid substitutions without significantly altering the biological activity or without adversely affecting the protein or polypeptide structure.

[0346] In making such changes, the hydropathy index of amino acids may be considered. The hydropathy profile of a protein is calculated by assigning each amino acid a numerical value (“hydropathy index”) and then repetitively averaging these values along the peptide chain. Each amino acid has been assigned a value based on its hydrophobicity and charge characteristics. They are: isoleucine (+4.5); valine (+4.2); leucine (+3.8); phenylalanine (+2.8); cysteine/cysteine (+2.5); methionine (+1.9); alanine (+1.8); glycine (−0.4); threonine (−0.7); serine (−0.8); tryptophan (−0.9); tyrosine (−1.3); proline (1.6); histidine (−3.2); glutamate (−3.5); glutamine (−3.5); aspartate (−3.5); asparagine (−3.5); lysine (−3.9); and arginine (−4.5). The importance of the hydropathy amino acid index in conferring interactive biologic function on a protein is generally understood in the art (Kyte et al., J. Mol. Biol. 157:105-131 (1982)). It is accepted that the relative hydropathic character of the amino acid contributes to the secondary structure of the resultant protein or polypeptide, which in turn defines the interaction of the protein or polypeptide with other molecules, for example, enzymes, substrates, receptors, DNA, antibodies, antigens, and others. It is also known that certain amino acids may be substituted for other amino acids having a similar hydropathy index or score, and still retain a similar biological activity. In making changes based upon the hydropathy index, in certain embodiments, the substitution of amino acids whose hydropathy indices are within ±2 is included. In some aspects of the invention, those that are within ±1 are included, and in other aspects of the invention, those within ±0.5 are included.

[0347] It also is understood in the art that the substitution of like amino acids can be effectively made based on hydrophilicity. U.S. Pat. No. 4,554,101, incorporated herein by reference, states that the greatest local average hydrophilicity of a protein, as governed by the hydrophilicity of its adjacent amino acids, correlates with a biological property of the protein. In certain embodiments, the greatest local average hydrophilicity of a protein, as governed by the hydrophilicity of its adjacent amino acids, correlates with its immunogenicity and antigen binding, that is, as a biological property of the protein. The following hydrophilicity values have been assigned to these amino acid residues: arginine (+3.0); lysine (+3.0); aspartate (+3.0±1); glutamate (+3.0±1); serine (+0.3); asparagine (+0.2); glutamine (+0.2); glycine (0); threonine (−0.4); proline (−0.5±1); alanine (−0.5); histidine (−0.5); cysteine (−1.0); methionine (−1.3); valine (−1.5); leucine (−1.8); isoleucine (−1.8); tyrosine (−2.3); phenylalanine (−2.5); and tryptophan (−3.4). In making changes based upon similar hydrophilicity values, in certain embodiments, the substitution of amino acids whose hydrophilicity values are within +2 are included, in other embodiments, those which are within ±1 are included, and in still other embodiments, those within are included. In some instances, one may also identify epitopes from primary amino acid sequences based on hydrophilicity. These regions are also referred to as “epitopic core regions.” It is understood that an amino acid can be substituted for another having a similar hydrophilicity value and still produce a biologically equivalent and immunologically equivalent protein.

[0348] Additionally, one skilled in the art can review structure-function studies identifying residues in similar polypeptides or proteins that are important for activity or structure. In view of such a comparison, one can predict the importance of amino acid residues in a protein that correspond to amino acid residues important for activity or structure in similar proteins. One skilled in the art may opt for chemically similar amino acid substitutions for such predicted important amino acid residues.

[0349] One skilled in the art can also analyze the three-dimensional structure and amino acid sequence in relation to that structure in similar proteins or polypeptides. In view of such information, one skilled in the art may predict the alignment of amino acid residues of an antibody with respect to its three-dimensional structure. One skilled in the art may choose not to make changes to amino acid residues predicted to be on the surface of the protein, since such residues may be involved in important interactions with other molecules. Moreover, one skilled in the art may generate test variants containing a single amino acid substitution at each desired amino acid residue. These variants can then be screened using standard assays for binding and/or activity, thus yielding information gathered from such routine experiments, which may allow one skilled in the art to determine the amino acid positions where further substitutions should be avoided either alone or in combination with other mutations. Various tools available to determine secondary structure can be found on the world wide web at expasy.org/proteomics/protein_structure.

[0350] In some embodiments of the invention, amino acid substitutions are made that: (1) reduce susceptibility to proteolysis, (2) reduce susceptibility to oxidation, (3) alter binding affinity for forming protein complexes, (4) alter ligand or antigen binding affinities, and/or (5) confer or modify other physicochemical or functional properties on such polypeptides. For example, single or multiple amino acid substitutions (in certain embodiments, conservative amino acid substitutions) may be made in the naturally occurring sequence. Substitutions can be made in that portion of the antibody that lies outside the domain(s) forming intermolecular contacts. In such embodiments, conservative amino acid substitutions can be used that do not substantially change the structural characteristics of the protein or polypeptide (e.g., one or more replacement amino acids that do not disrupt the secondary structure that characterizes the native antibody).

### VII. Nucleic Acids

[0351] In certain embodiments, nucleic acid sequences can exist in a variety of instances such as: isolated segments and recombinant vectors of incorporated sequences or recombinant polynucleotides encoding peptides and polypeptides of the disclosure, or a fragment, derivative, mutein, or variant thereof, polynucleotides sufficient for use as hybridization probes, PCR primers or sequencing primers for identifying, analyzing, mutating or amplifying a polynucleotide encoding a polypeptide, anti-sense nucleic acids for inhibiting expression of a polynucleotide, and complementary sequences of the foregoing described herein. Nucleic acids encoding fusion proteins that include these peptides are also provided. The nucleic acids can be single-stranded or double-stranded and can comprise RNA and/or DNA nucleotides and artificial variants thereof (e.g., peptide nucleic acids).

[0352] The term “polynucleotide” refers to a nucleic acid molecule that either is recombinant or has been isolated from total genomic nucleic acid. Included within the term “polynucleotide” are oligonucleotides (nucleic acids 100 residues or less in length), recombinant vectors, including, for example, plasmids, cosmids, phage, viruses, and the like. Polynucleotides include, in certain aspects, regulatory sequences, isolated substantially away from their naturally occurring genes or protein encoding sequences. Polynucleotides may be single-stranded (coding or antisense) or double-stranded, and may be RNA, DNA (genomic, cDNA or synthetic), analogs thereof, or a combination thereof. Additional coding or non-coding sequences may, but need not, be present within a polynucleotide.

[0353] In this respect, the term “gene,” “polynucleotide,” or “nucleic acid” is used to refer to a nucleic acid that encodes a protein, polypeptide, or peptide (including any sequences required for proper transcription, post-translational modification, or localization). As will be understood by those in the art, this term encompasses genomic sequences, expression cassettes, cDNA sequences, and smaller engineered nucleic acid segments that express, or may be adapted to express, proteins, polypeptides, domains, peptides, fusion proteins, and mutants. A nucleic acid encoding all or part of a polypeptide may contain a contiguous nucleic acid sequence encoding all or a portion of such a polypeptide. It also is contemplated that a particular polypeptide may be encoded by nucleic acids containing variations having slightly different nucleic acid sequences but, nonetheless, encode the same or substantially similar protein.

[0354] In certain embodiments, there are polynucleotide variants having substantial identity to the sequences disclosed herein; those comprising at least 70%, 75%, 80%, 85%, 90%, 95%, 96%, 97%, 98%, or 99% or higher sequence identity, including all values and ranges there between, compared to a polynucleotide sequence provided herein using the methods described herein (e.g., BLAST analysis using standard parameters). In certain aspects, the isolated polynucleotide will comprise a nucleotide sequence encoding a polypeptide that has at least 90%, preferably 95% and above, identity to an amino acid sequence described herein, over the entire length of the sequence; or a nucleotide sequence complementary to said isolated polynucleotide.

[0355] The nucleic acid segments, regardless of the length of the coding sequence itself, may be combined with other nucleic acid sequences, such as promoters, polyadenylation signals, additional restriction enzyme sites, multiple cloning sites, other coding segments, and the like, such that their overall length may vary considerably. The nucleic acids can be any length. They can be, for example, 5, 10, 15, 20, 25, 30, 35, 40, 45, 50, 75, 100, 125, 175, 200, 250, 300, 350, 400, 450, 500, 750, 1000, 1500, 3000, 5000 or more nucleotides in length, and/or can comprise one or more additional sequences, for example, regulatory sequences, and/or be a part of a larger nucleic acid, for example, a vector. It is therefore contemplated that a nucleic acid fragment of almost any length may be employed, with the total length preferably being limited by the ease of preparation and use in the intended recombinant nucleic acid protocol. In some cases, a nucleic acid sequence may encode a polypeptide sequence with additional heterologous coding sequences, for example to allow for purification of the polypeptide, transport, secretion, post-translational modification, or for therapeutic benefits such as targeting or efficacy. As discussed above, a tag or other heterologous polypeptide may be added to the modified polypeptide-encoding sequence, wherein “heterologous” refers to a polypeptide that is not the same as the modified polypeptide.

[0356] A. Hybridization

[0357] The nucleic acids that hybridize to other nucleic acids under particular hybridization conditions. Methods for hybridizing nucleic acids are well known in the art. See, e.g., Current Protocols in Molecular Biology, John Wiley and Sons, N.Y. (1989), 6.3.1-6.3.6. As defined herein, a moderately stringent hybridization condition uses a prewashing solution containing 5× sodium chloride/sodium citrate (SSC), 0.5% SDS, 1.0 mM EDTA (pH 8.0), hybridization buffer of about 50% formamide, 6×SSC, and a hybridization temperature of 55° C. (or other similar hybridization solutions, such as one containing about 50% formamide, with a hybridization temperature of 42° C.), and washing conditions of 60° C. in 0.5×SSC, 0.1% SDS. A stringent hybridization condition hybridizes in 6×SSC at 45° C., followed by one or more washes in 0.1×SSC, 0.2% SDS at 68° C. Furthermore, one of skill in the art can manipulate the hybridization and/or washing conditions to increase or decrease the stringency of hybridization such that nucleic acids comprising nucleotide sequence that are at least 65%, at least 70%, at least 75%, at least 80%, at least 85%, at least 90%, at least 95%, at least 96%, at least 97%, at least 98% or at least 99% identical to each other typically remain hybridized to each other.

[0358] The parameters affecting the choice of hybridization conditions and guidance for devising suitable conditions are set forth by, for example, Sambrook, Fritsch, and Maniatis (Molecular Cloning: A Laboratory Manual, Cold Spring Harbor Laboratory Press, Cold Spring Harbor, N.Y., chapters 9 and 11 (1989); Current Protocols in Molecular Biology, Ausubel et al., eds., John Wiley and Sons, Inc., sections 2.10 and 6.3-6.4 (1995), both of which are herein incorporated by reference in their entirety for all purposes) and can be readily determined by those having ordinary skill in the art based on, for example, the length and/or base composition of the DNA.

[0359] B. Mutation

[0360] Changes can be introduced by mutation into a nucleic acid, thereby leading to changes in the amino acid sequence of a polypeptide (e.g., an antigenic peptide or polypeptide) that it encodes. Mutations can be introduced using any technique known in the art. In one embodiment, one or more particular amino acid residues are changed using, for example, a site-directed mutagenesis protocol. In another embodiment, one or more randomly selected residues are changed using, for example, a random mutagenesis protocol. However it is made, a mutant polypeptide can be expressed and screened for a desired property.

[0361] Mutations can be introduced into a nucleic acid without significantly altering the biological activity of a polypeptide that it encodes. For example, one can make nucleotide substitutions leading to amino acid substitutions at non-essential amino acid residues. Alternatively, one or more mutations can be introduced into a nucleic acid that selectively changes the biological activity of a polypeptide that it encodes. See, eg., Romain Studer et al., Biochem. J. 449:581-594 (2013). For example, the mutation can quantitatively or qualitatively change the biological activity. Examples of quantitative changes include increasing, reducing or eliminating the activity. Examples of qualitative changes include altering the antigen specificity of an antibody.

[0362] C. Probes

[0363] In another aspect, nucleic acid molecules are suitable for use as primers or hybridization probes for the detection of nucleic acid sequences. A nucleic acid molecule can comprise only a portion of a nucleic acid sequence encoding a full-length polypeptide, for example, a fragment that can be used as a probe or primer or a fragment encoding an active portion of a given polypeptide.

[0364] In another embodiment, the nucleic acid molecules may be used as probes or PCR primers for specific nucleic acid sequences. For instance, a nucleic acid molecule probe may be used in diagnostic methods or a nucleic acid molecule PCR primer may be used to amplify regions of DNA that could be used, inter alia, to isolate nucleic acid sequences for use in producing the engineered cells of the disclosure. In a preferred embodiment, the nucleic acid molecules are oligonucleotides.

[0365] Probes based on the desired sequence of a nucleic acid can be used to detect the nucleic acid or similar nucleic acids, for example, transcripts encoding a polypeptide of interest. The probe can comprise a label group, e.g., a radioisotope, a fluorescent compound, an enzyme, or an enzyme co-factor. Such probes can be used to identify a cell that expresses the polypeptide.

### VIII. Polypeptide Expression

[0366] In some aspects, there are nucleic acid molecule encoding polypeptides, antibodies, or antigen binding fragments of the disclosure. The nucleic acid molecules may be used to express large quantities of polypeptides. If the nucleic acid molecules are derived from a non-human, non-transgenic animal, the nucleic acid molecules may be used for humanization of the antibody or TCR genes.

[0367] A. Vectors

[0368] In some aspects, contemplated are expression vectors comprising a nucleic acid molecule encoding a polypeptide of the desired sequence or a portion thereof (e.g., a fragment containing one or more CDRs or one or more variable region domains). Expression vectors comprising the nucleic acid molecules may encode the heavy chain, light chain, or the antigen-binding portion thereof. In some aspects, expression vectors comprising nucleic acid molecules may encode fusion proteins, modified antibodies, antibody heavy and/or light chain, antibody fragments, and probes thereof. In addition to control sequences that govern transcription and translation, vectors and expression vectors may contain nucleic acid sequences that serve other functions as well.

[0369] To express the polypeptides or peptides of the disclosure, DNAs encoding the polypeptides or peptides are inserted into expression vectors such that the gene area is operatively linked to transcriptional and translational control sequences. In some aspects, a vector that encodes a functionally complete human CH or CL immunoglobulin sequence with appropriate restriction sites engineered so that any VH or VL sequence can be easily inserted and expressed. In some aspects, a vector that encodes a functionally complete human TCR alpha or TCR beta sequence with appropriate restriction sites engineered so that any variable sequence or CDR1, CDR2, and/or CDR3 can be easily inserted and expressed. Typically, expression vectors used in any of the host cells contain sequences for plasmid or virus maintenance and for cloning and expression of exogenous nucleotide sequences. Such sequences, collectively referred to as “flanking sequences” typically include one or more of the following operatively linked nucleotide sequences: a promoter, one or more enhancer sequences, an origin of replication, a transcriptional termination sequence, a complete intron sequence containing a donor and acceptor splice site, a sequence encoding a leader sequence for polypeptide secretion, a ribosome binding site, a polyadenylation sequence, a polylinker region for inserting the nucleic acid encoding the polypeptide to be expressed, and a selectable marker element. Such sequences and methods of using the same are well known in the art.

[0370] B. Expression Systems

[0371] Numerous expression systems exist that comprise at least a part or all of the expression vectors discussed above. Prokaryote- and/or eukaryote-based systems can be employed for use with an embodiment to produce nucleic acid sequences, or their cognate polypeptides, proteins and peptides. Commercially and widely available systems include in but are not limited to bacterial, mammalian, yeast, and insect cell systems. Different host cells have characteristic and specific mechanisms for the post-translational processing and modification of proteins. Appropriate cell lines or host systems can be chosen to ensure the correct modification and processing of the foreign protein expressed. Those skilled in the art are able to express a vector to produce a nucleic acid sequence or its cognate polypeptide, protein, or peptide using an appropriate expression system.

[0372] C. Methods of Gene Transfer

[0373] Suitable methods for nucleic acid delivery to effect expression of compositions are anticipated to include virtually any method by which a nucleic acid (e.g., DNA, including viral and nonviral vectors) can be introduced into a cell, a tissue or an organism, as described herein or as would be known to one of ordinary skill in the art. Such methods include, but are not limited to, direct delivery of DNA such as by injection (U.S. Pat. No. 5,994,624, 5,981,274, 5,780,448, 5,736,524, 5,702,932, 5,656,610, 5,589,466 and 5,580,859, each incorporated herein by reference), including microinjection (Harland and Weintraub, 1985; U.S. Pat. No. 5,789,215, incorporated herein by reference); by electroporation (U.S. Pat. No. 5,384,253, incorporated herein by reference); by calcium phosphate precipitation (Graham and Van Der Eb, 1973; Chen and Okayama, 1987; Rippe et al., 1990); by using DEAE dextran followed by polyethylene glycol (Gopal, 1985); by direct sonic loading (Fechheimer et al., 1987); by liposome mediated transfection (Nicolau and Sene, 1982; Fraley et al., 1979; Nicolau et al., 1987; Wong et al., 1980; Kaneda et al., 1989; Kato et al., 1991); by microprojectile bombardment (PCT Application Nos. WO 94/09699 and 95/06128; U.S. Pat. Nos. 5,610,042; 5,322,783, 5,563,055, 5,550,318, 5,538,877 and 5,538,880, and each incorporated herein by reference); by agitation with silicon carbide fibers (Kaeppler et al., 1990; U.S. Pat. Nos. 5,302,523 and 5,464,765, each incorporated herein by reference); by Agrobacterium mediated transformation (U.S. Pat. Nos. 5,591,616 and 5,563,055, each incorporated herein by reference); or by PEG mediated transformation of protoplasts (Omirulleh et al., 1993; U.S. Pat. Nos. 4,684,611 and 4,952,500, each incorporated herein by reference); by desiccation/inhibition mediated DNA uptake (Potrykus et al., 1985). Other methods include viral transduction, such as gene transfer by lentiviral or retroviral transduction.

### IX. Pharmaceutical Compositions

[0374] The present disclosure includes methods for treating disease and modulating immune responses in a subject in need thereof. The disclosure includes cells that may be in the form of a pharmaceutical composition that can be used to induce or modify an immune response.

[0375] Administration of the compositions according to the current disclosure will typically be via any common route. This includes, but is not limited to parenteral, orthotopic, intradermal, subcutaneous, orally, transdermally, intramuscular, intraperitoneal, intraperitoneally, intraorbitally, by implantation, by inhalation, intraventricularly, intranasally or intravenous injection. In some embodiments, compositions of the present disclosure (e.g., compositions comprising SARS-CoV-2 protein-binding polypeptides) are administered to a subject intravenously.

[0376] Typically, compositions and therapies of the disclosure are administered in a manner compatible with the dosage formulation, and in such amount as will be therapeutically effective and immune modifying. The quantity to be administered depends on the subject to be treated. Precise amounts of active ingredient required to be administered depend on the judgment of the practitioner.

[0377] The manner of application may be varied widely. Any of the conventional methods for administration of pharmaceutical compositions comprising cellular components are applicable. The dosage of the pharmaceutical composition will depend on the route of administration and will vary according to the size and health of the subject.

[0378] In many instances, it will be desirable to have multiple administrations of at most or at least 3, 4, 5, 6, 7, 8, 9, 10 or more. The administrations may range from 2-day to 12-week intervals, more usually from one to two week intervals.

[0379] The phrases “pharmaceutically acceptable” or “pharmacologically acceptable” refer to molecular entities and compositions that do not produce an adverse, allergic, or other untoward reaction when administered to an animal, or human. As used herein, “pharmaceutically acceptable carrier” includes any and all solvents, dispersion media, coatings, antibacterial and antifungal agents, isotonic and absorption delaying agents, and the like. The use of such media and agents for pharmaceutical active substances is well known in the art. Except insofar as any conventional media or agent is incompatible with the active ingredients, its use in immunogenic and therapeutic compositions is contemplated. The pharmaceutical compositions of the current disclosure are pharmaceutically acceptable compositions.

[0380] The compositions of the disclosure can be formulated for parenteral administration, e.g., formulated for injection via the intravenous, intramuscular, subcutaneous, or even intraperitoneal routes. Typically, such compositions can be prepared as injectables, either as liquid solutions or suspensions and the preparations can also be emulsified.

[0381] Pharmaceutical forms suitable for injectable use include sterile aqueous solutions or dispersions; formulations including sesame oil, peanut oil, or aqueous propylene glycol. It also should be stable under the conditions of manufacture and storage and must be preserved against the contaminating action of microorganisms, such as bacteria and fungi.

[0382] Sterile injectable solutions are prepared by incorporating the active ingredients (e.g., polypeptides of the disclosure) in the required amount in the appropriate solvent with various of the other ingredients enumerated above, as required, followed by filtered sterilization. Generally, dispersions are prepared by incorporating the various sterilized active ingredients into a sterile vehicle which contains the basic dispersion medium and the required other ingredients from those enumerated above.

[0383] An effective amount of a composition is determined based on the intended goal. The term “unit dose” or “dosage” refers to physically discrete units suitable for use in a subject, each unit containing a predetermined quantity of the composition calculated to produce the desired responses discussed herein in association with its administration, i.e., the appropriate route and regimen. The quantity to be administered, both according to number of treatments and unit dose, depends on the result and/or protection desired. Precise amounts of the composition also depend on the judgment of the practitioner and are peculiar to each individual. Factors affecting dose include physical and clinical state of the subject, route of administration, intended goal of treatment (alleviation of symptoms versus cure), and potency, stability, and toxicity of the particular composition. Upon formulation, solutions will be administered in a manner compatible with the dosage formulation and in such amount as is therapeutically or prophylactically effective. The formulations are easily administered in a variety of dosage forms, such as the type of injectable solutions described above.

[0384] The compositions and related methods of the present disclosure, particularly administration of a composition of the disclosure may also be used in combination with the administration of additional therapies such as the additional therapeutics described herein or in combination with other traditional therapeutics known in the art.

[0385] The therapeutic compositions and treatments disclosed herein may precede, be co-current with and/or follow another treatment or agent by intervals ranging from minutes to weeks. In embodiments where agents are applied separately to a cell, tissue or organism, one would generally ensure that a significant period of time did not expire between the time of each delivery, such that the therapeutic agents would still be able to exert an advantageously combined effect on the cell, tissue or organism. For example, in such instances, it is contemplated that one may contact the cell, tissue or organism with two, three, four or more agents or treatments substantially simultaneously (i.e., within less than about a minute). In other aspects, one or more therapeutic agents or treatments may be administered or provided within 1 minute, 5 minutes, 10 minutes, 20 minutes, 30 minutes, 45 minutes, 60 minutes, 2 hours, 3 hours, 4 hours, 5 hours, 6 hours, 7 hours, 8 hours, 9 hours, 10 hours, 11 hours, 12 hours, 13 hours, 14 hours, 15 hours, 16 hours, 17 hours, 18 hours, 19 hours, 20 hours, 21 hours, 22 hours, 22 hours, 23 hours, 24 hours, 25 hours, 26 hours, 27 hours, 28 hours, 29 hours, 30 hours, 31 hours, 32 hours, 33 hours, 34 hours, 35 hours, 36 hours, 37 hours, 38 hours, 39 hours, hours, 41 hours, 42 hours, 43 hours, 44 hours, 45 hours, 46 hours, 47 hours, 48 hours, 1 day, 2 days, 3 days, 4 days, 5 days, 6 days, 7 days, 8 days, 9 days, 10 days, 11 days, 12 days, 13 days, 14 days, 15 days, 16 days, 17 days, 18 days, 19 days, 20 days, 21 days, 1 week, 2 weeks, 3 weeks, 4 weeks, 5 weeks, 6 weeks, 7 weeks, or 8 weeks or more, and any range derivable therein, prior to and/or after administering another therapeutic agent or treatment.

[0386] The treatments may include various “unit doses.” Unit dose is defined as containing a predetermined-quantity of the therapeutic composition. The quantity to be administered, and the particular route and formulation, is within the skill of determination of those in the clinical arts. A unit dose need not be administered as a single injection but may comprise continuous infusion over a set period of time. In some embodiments, a unit dose comprises a single administrable dose.

[0387] The quantity to be administered, both according to number of treatments and unit dose, depends on the treatment effect desired. An effective dose is understood to refer to an amount necessary to achieve a particular effect. In the practice in certain embodiments, it is contemplated that doses in the range from 10 mg/kg to 200 mg/kg can affect the protective capability of these agents. Thus, it is contemplated that doses include doses of about 0.1, 0.5, 1, 5, 10, 15, 20, 25, 30, 35, 40, 45, 50, 55, 60, 65, 70, 75, 80, 85, 90, 100, 105, 110, 115, 120, 125, 130, 135, 140, 145, 150, 155, 160, 165, 170, 175, 180, 185, 190, 195, and 200, 300, 400, 500, 1000 ng/kg, mg/kg, μg/day, or mg/day or any range derivable therein. Furthermore, such doses can be administered at multiple times during a day, and/or on multiple days, weeks, or months.

[0388] In some embodiments, the therapeutically effective or sufficient amount of the immune checkpoint inhibitor, such as an antibody and/or microbial modulator, that is administered to a human will be in the range of about 0.01 to about 50 mg/kg of patient body weight whether by one or more administrations. In some embodiments, the therapy used is about 0.01 to about 45 mg/kg, about 0.01 to about 40 mg/kg, about 0.01 to about 35 mg/kg, about 0.01 to about 30 mg/kg, about 0.01 to about 25 mg/kg, about 0.01 to about 20 mg/kg, about 0.01 to about 15 mg/kg, about 0.01 to about 10 mg/kg, about 0.01 to about 5 mg/kg, or about 0.01 to about 1 mg/kg administered daily, for example. In one embodiment, a therapy described herein is administered to a subject at a dose of about 100 mg, about 200 mg, about 300 mg, about 400 mg, about 500 mg, about 600 mg, about 700 mg, about 800 mg, about 900 mg, about 1000 mg, about 1100 mg, about 1200 mg, about 1300 mg or about 1400 mg on day 1 of 21-day cycles. The dose may be administered as a single dose or as multiple doses (e.g., 2 or 3 doses), such as infusions. The progress of this therapy is easily monitored by conventional techniques.

[0389] In certain embodiments, the effective dose of the pharmaceutical composition is one which can provide a blood level of about 1 μM to 150 μM. In another embodiment, the effective dose provides a blood level of about 4 μM to 100 μM; or about 1 μM to 100 μM; or about 1 μM to 50 μM; or about 1 μM to 40 μM; or about 1 μM to 30 μM; or about 1 μM to 20 μM; or about 1 μM to 10 μM; or about 10 μM to 150 μM; or about 10 μM to 100 μM; or about μM to 50 μM; or about 25 μM to 150 μM; or about 25 μM to 100 μM; or about 25 μM to 50 μM, or about 50 μM to 150 μM; or about 50 μM to 100 μM (or any range derivable therein). In other embodiments, the dose can provide the following blood level of the agent that results from a therapeutic agent being administered to a subject: about, at least about, or at most about 1, 2, 3, 4, 5, 6, 7, 8, 9, 10, 11, 12, 13, 14, 15, 16, 17, 18, 19, 20, 21, 22, 23, 24, 25, 26, 27, 28, 29, 30, 31, 32, 33, 34, 35, 36, 37, 38, 39, 40, 41, 42, 43, 44, 45, 46, 47, 48, 49, 50, 51, 52, 53, 54, 55, 56, 57, 58, 59, 60, 61, 62, 63, 64, 65, 66, 67, 68, 69, 70, 71, 72, 73, 74, 75, 76, 77, 78, 79, 80, 81, 82, 83, 84, 85, 86, 87, 88, 89, 90, 91, 92, 93, 94, 95, 96, 97, 98, 99, or 100 μM or any range derivable therein. In certain embodiments, the therapeutic agent that is administered to a subject is metabolized in the body to a metabolized therapeutic agent, in which case the blood levels may refer to the amount of that agent. Alternatively, to the extent the therapeutic agent is not metabolized by a subject, the blood levels discussed herein may refer to the unmetabolized therapeutic agent.

[0390] Precise amounts of the therapeutic composition also depend on the judgment of the practitioner and are peculiar to each individual. Factors affecting dose include physical and clinical state of the patient, the route of administration, the intended goal of treatment (alleviation of symptoms versus cure) and the potency, stability and toxicity of the particular therapeutic substance or other therapies a subject may be undergoing.

[0391] It will be understood by those skilled in the art and made aware that dosage units of μg/kg or mg/kg of body weight can be converted and expressed in comparable concentration units of μg/ml or mM (blood levels), such as 4 μM to 100 μM. It is also understood that uptake is species and organ/tissue dependent. The applicable conversion factors and physiological assumptions to be made concerning uptake and concentration measurement are well-known and would permit those of skill in the art to convert one concentration measurement to another and make reasonable comparisons and conclusions regarding the doses, efficacies and results described herein.

### X. Detectable Labels

[0392] In some aspects of this disclosure, it will be useful to detectably or therapeutically label a Fab polypeptide or protein G Fab-binding domain. Methods for conjugating polypeptides to these agents are known in the art. For the purpose of illustration only, polypeptides can be labeled with a detectable moiety such as a radioactive atom, a chromophore, a fluorophore, or the like. Such labeled polypeptides can be used for diagnostic techniques, either in vivo, or in an isolated test sample or in methods described herein.

[0393] As used herein, the term “label” intends a directly or indirectly detectable compound or composition that is conjugated directly or indirectly to the composition to be detected, e.g., polynucleotide or protein such as an antibody so as to generate a “labeled” composition. The term also includes sequences conjugated to the polynucleotide that will provide a signal upon expression of the inserted sequences, such as green fluorescent protein (GFP) and the like. The label may be detectable by itself (e.g. radioisotope labels or fluorescent labels) or, in the case of an enzymatic label, may catalyze chemical alteration of a substrate compound or composition that is detectable. The labels can be suitable for small scale detection or more suitable for high-throughput screening. As such, suitable labels include, but are not limited to radioisotopes, fluorochromes, chemiluminescent compounds, dyes, and proteins, including enzymes. The label may be simply detected or it may be quantified. A response that is simply detected generally comprises a response whose existence merely is confirmed, whereas a response that is quantified generally comprises a response having a quantifiable (e.g., numerically reportable) value such as an intensity, polarization, and/or other property. In luminescence or fluorescence assays, the detectable response may be generated directly using a luminophore or fluorophore associated with an assay component actually involved in binding, or indirectly using a luminophore or fluorophore associated with another (e.g., reporter or indicator) component.

[0394] Examples of luminescent labels that produce signals include, but are not limited to bioluminescence and chemiluminescence. Detectable luminescence response generally comprises a change in, or an occurrence of, a luminescence signal. Suitable methods and luminophores for luminescently labeling assay components are known in the art and described for example in Haugland, Richard P. (1996) Handbook of Fluorescent Probes and Research Chemicals (6.sup.th ed.). Examples of luminescent probes include, but are not limited to, aequorin and luciferases.

[0395] Examples of suitable fluorescent labels include, but are not limited to, fluorescein, rhodamine, tetramethylrhodamine, eosin, erythrosin, coumarin, methyl-coumarins, pyrene, Malacite green, stilbene, Lucifer Yellow, Cascade Blue.™., and Texas Red. Other suitable optical dyes are described in the Haugland, Richard P. (1996) Handbook of Fluorescent Probes and Research Chemicals (6.sup.th ed.).

[0396] In another aspect, the fluorescent label is functionalized to facilitate covalent attachment to a cellular component present in or on the surface of the cell or tissue such as a cell surface marker. Suitable functional groups, including, but not are limited to, isothiocyanate groups, amino groups, haloacetyl groups, maleimides, succinimidyl esters, and sulfonyl halides, all of which may be used to attach the fluorescent label to a second molecule. The choice of the functional group of the fluorescent label will depend on the site of attachment to either a linker, the agent, the marker, or the second labeling agent.

[0397] Attachment of the fluorescent label may be either directly to the cellular component or compound or alternatively, can by via a linker. Suitable binding pairs for use in indirectly linking the fluorescent label to the intermediate include, but are not limited to, antigens/polypeptides, e.g., rhodamine/anti-rhodamine, biotin/avidin and biotin/strepavidin.

[0398] The coupling of polypeptides to low molecular weight haptens can increase the sensitivity of the antibody in an assay. The haptens can then be specifically detected by means of a second reaction. For example, it is common to use haptens such as biotin, which reacts avidin, or dinitrophenol, pyridoxal, and fluorescein, which can react with specific anti-hapten polypeptides. See, Harlow and Lane (1988) supra.

### XI. Sample Preparation

[0399] In certain aspects, methods involve obtaining or evaluating a sample from a subject. The sample may include a sample obtained from any source including but not limited to blood, sweat, hair follicle, buccal tissue, tears, menses, feces, or saliva. In certain aspects of the current methods, any medical professional such as a doctor, nurse or medical technician may obtain a biological sample for testing. Yet further, the biological sample can be obtained without the assistance of a medical professional.

[0400] A sample may include but is not limited to, tissue, cells, or biological material from cells or derived from cells of a subject. The biological sample may be a heterogeneous or homogeneous population of cells or tissues. The biological sample may be obtained using any method known to the art that can provide a sample suitable for the analytical methods described herein. The sample may be obtained by non-invasive methods including but not limited to: scraping of the skin or cervix, swabbing of the cheek, saliva collection, urine collection, feces collection, collection of menses, tears, or semen.

[0401] The sample may be obtained by methods known in the art. In certain embodiments the samples are obtained by biopsy. In other embodiments the sample is obtained by swabbing, endoscopy, scraping, phlebotomy, or any other methods known in the art. In some cases, the sample may be obtained, stored, or transported using components of a kit of the present methods. In some cases, multiple samples, such as multiple esophageal samples may be obtained for diagnosis by the methods described herein. In other cases, multiple samples, such as one or more samples from one tissue type (for example esophagus) and one or more samples from another specimen (for example serum) may be obtained for diagnosis by the methods. In some cases, multiple samples such as one or more samples from one tissue type (e.g. esophagus) and one or more samples from another specimen (e.g. serum) may be obtained at the same or different times. Samples may be obtained at different times are stored and/or analyzed by different methods. For example, a sample may be obtained and analyzed by routine staining methods or any other cytological analysis methods.

[0402] In some embodiments the biological sample may be obtained by a physician, nurse, or other medical professional such as a medical technician, endocrinologist, cytologist, phlebotomist, radiologist, or a pulmonologist. The medical professional may indicate the appropriate test or assay to perform on the sample. In certain aspects a molecular profiling business may consult on which assays or tests are most appropriately indicated. In further aspects of the current methods, the patient or subject may obtain a biological sample for testing without the assistance of a medical professional, such as obtaining a whole blood sample, a urine sample, a fecal sample, a buccal sample, or a saliva sample.

[0403] In other cases, the sample is obtained by an invasive procedure including but not limited to: biopsy, needle aspiration, endoscopy, or phlebotomy. The method of needle aspiration may further include fine needle aspiration, core needle biopsy, vacuum assisted biopsy, or large core biopsy. In some embodiments, multiple samples may be obtained by the methods herein to ensure a sufficient amount of biological material.

[0404] General methods for obtaining biological samples are also known in the art. Publications such as Ramzy, Ibrahim Clinical Cytopathology and Aspiration Biopsy 2001, which is herein incorporated by reference in its entirety, describes general methods for biopsy and cytological methods. In one embodiment, the sample is a fine needle aspirate of a esophageal or a suspected esophageal tumor or neoplasm. In some cases, the fine needle aspirate sampling procedure may be guided by the use of an ultrasound, X-ray, or other imaging device.

[0405] In some embodiments of the present methods, the molecular profiling business may obtain the biological sample from a subject directly, from a medical professional, from a third party, or from a kit provided by a molecular profiling business or a third party. In some cases, the biological sample may be obtained by the molecular profiling business after the subject, a medical professional, or a third party acquires and sends the biological sample to the molecular profiling business. In some cases, the molecular profiling business may provide suitable containers, and excipients for storage and transport of the biological sample to the molecular profiling business.

[0406] In some embodiments of the methods described herein, a medical professional need not be involved in the initial diagnosis or sample acquisition. An individual may alternatively obtain a sample through the use of an over the counter (OTC) kit. An OTC kit may contain a means for obtaining said sample as described herein, a means for storing said sample for inspection, and instructions for proper use of the kit. In some cases, molecular profiling services are included in the price for purchase of the kit. In other cases, the molecular profiling services are billed separately. A sample suitable for use by the molecular profiling business may be any material containing tissues, cells, nucleic acids, genes, gene fragments, expression products, gene expression products, or gene expression product fragments of an individual to be tested. Methods for determining sample suitability and/or adequacy are provided.

[0407] In some embodiments, the subject may be referred to a specialist such as an oncologist, surgeon, or endocrinologist. The specialist may likewise obtain a biological sample for testing or refer the individual to a testing center or laboratory for submission of the biological sample. In some cases the medical professional may refer the subject to a testing center or laboratory for submission of the biological sample. In other cases, the subject may provide the sample. In some cases, a molecular profiling business may obtain the sample.

### XII. Host Cells

[0408] As used herein, the terms “cell,” “cell line,” and “cell culture” may be used interchangeably. All of these terms also include both freshly isolated cells and ex vivo cultured, activated or expanded cells. All of these terms also include their progeny, which is any and all subsequent generations. It is understood that all progeny may not be identical due to deliberate or inadvertent mutations. In the context of expressing a heterologous nucleic acid sequence, “host cell” refers to a prokaryotic or eukaryotic cell, and it includes any transformable organism that is capable of replicating a vector or expressing a heterologous gene encoded by a vector. A host cell can, and has been, used as a recipient for vectors or viruses. A host cell may be “transfected” or “transformed,” which refers to a process by which exogenous nucleic acid, such as a recombinant protein-encoding sequence, is transferred or introduced into the host cell. A transformed cell includes the primary subject cell and its progeny.

[0409] In certain embodiments transfection can be carried out on any prokaryotic or eukaryotic cell. In some aspects electroporation involves transfection of a human cell. In other aspects electroporation involves transfection of an animal cell. In certain aspects transfection involves transfection of a cell line or a hybrid cell type. In some aspects the cell or cells being transfected are cancer cells, tumor cells or immortalized cells. In some instances tumor, cancer, immortalized cells or cell lines are induced and in other instances tumor, cancer, immortalized cells or cell lines enter their respective state or condition naturally. In certain aspects the cells or cell lines can be A549, B-cells, B16, BHK-21, C2C12, C6, CaCo-2, CAP/, CAP-T, CHO, CHO2, CHO-DG44, CHO-K1, COS-1, Cos-7, CV-1, Dendritic cells, DLD-1, Embryonic Stem (ES) Cell or derivative, H1299, HEK, 293, 293T, 293FT, Hep G2, Hematopoietic Stem Cells, HOS, Huh-7, Induced Pluripotent Stem (iPS) Cell or derivative, Jurkat, K562, L5278Y, LNCaP, MCF7, MDA-MB-231, MDCK, Mesenchymal Cells, Min-6, Monocytic cell, Neuro2a, NIH 3T3, NIH3T3L1, K562, NK-cells, NS0, Panc-1, PC12, PC-3, Peripheral blood cells, Plasma cells, Primary Fibroblasts, RBL, Renca, RLE, SF21, SF9, SH-SYSY, SK-MES-1, SK-N-SH, SL3, SW403, Stimulus-triggered Acquisition of Pluripotency (STAP) cell or derivate SW403, T-cells, THP-1, Tumor cells, U2OS, U937, peripheral blood lymphocytes, expanded T cells, hematopoietic stem cells, or Vero cells.

### XIII. Kits

[0410] Certain aspects of the present invention also concern kits containing compositions of the disclosure or compositions to implement methods of the disclosure. In some embodiments, kits can be used to detect the presence of a SARS-CoV-2 virus in a sample. In certain embodiments, a kit contains, contains at least or contains at most 1, 2, 3, 4, 5, 6, 7, 8, 9, 11, 12, 13, 14, 15, 16, 17, 18, 19, 20, 21, 22, 23, 24, 25, 26, 27, 28, 29, 30, 31, 32, 33, 34, 36, 37, 38, 39, 40, 41, 42, 43, 44, 45, 46, 47, 48, 49, 50, 100, 500, 1,000 or more probes, primers or primer sets, synthetic molecules or inhibitors, or any value or range and combination derivable therein. In some embodiments, a kit contains one or more polypeptides capable of binding to a SARS-CoV-2 spike protein, including polypeptides disclosed herein. For example, a kit may comprise at least 1, 2, 3, 4, 5, 6, 7, 8, 9, 10 or more Fabs disclosed herein for detecting a SARS-CoV-2 spike protein. In some embodiments, a kit comprises a detection pair. In some embodiments, a kit comprises an enzyme. In some embodiments, a kit comprises a substrate for an enzyme.

[0411] Kits may comprise components, which may be individually packaged or placed in a container, such as a tube, bottle, vial, syringe, or other suitable container means.

[0412] Individual components may also be provided in a kit in concentrated amounts; in some embodiments, a component is provided individually in the same concentration as it would be in a solution with other components. Concentrations of components may be provided as 1×, 2×, 5×, 10×, or 20× or more.

[0413] Kits for using probes, synthetic nucleic acids, nonsynthetic nucleic acids, and/or inhibitors of the disclosure for prognostic or diagnostic applications are included as part of the disclosure. In certain aspects, negative and/or positive control nucleic acids, probes, and inhibitors are included in some kit embodiments.

[0414] Kits may further comprise instructions for use. For example, in some embodiments, a kit comprises instructions for detecting a SARS-CoV-2 virus in a sample.

[0415] It is contemplated that any method or composition described herein can be implemented with respect to any other method or composition described herein and that different embodiments may be combined. The claims originally filed are contemplated to cover claims that are multiply dependent on any filed claim or combination of filed claims.

### XIV. Examples

[0416] The following examples are included to demonstrate certain embodiments of the invention. It should be appreciated by those of skill in the art that the techniques disclosed in the examples which follow represent techniques discovered by the inventor to function well in the practice of the invention. However, those of skill in the art should, in light of the present disclosure, appreciate that many changes can be made in the specific embodiments which are disclosed and still obtain a like or similar result without departing from the spirit and scope of the invention.

### Example 1—Distinct B Cell Subsets Give Rise to Antigen-Specific Antibody Responses Against SARS-CoV-2

[0417] A. Results

[0418] 1. SARS-CoV-2-Specific B Cell Sequencing

[0419] Serum antibodies and MBCs have potential to act as the first line of defense against SARS-CoV-2 infection^{11, 15-17}. To determine the landscape of antibody reactivity toward distinct SARS-CoV-2 viral targets, the inventors collected peripheral blood mononuclear cells (PBMCs) and serum from 25 subjects between April and May of 2020 upon recovery from SARS-CoV-2 viral infection (Extended Data Table 1 and Extended Data Table 2). To identify B cells specific to the SARS-CoV-2 spike protein, spike RBD, ORF7a, ORF8, and NP, the inventors generated probes to bait-sort enriched B cells for subsequent single cell RNA sequencing analysis by conjugating distinct phycoerythrin (PE)-streptavidin (SA)-oligos to individual biotinylated antigens (FIG. 1a).

[0420] From 25 subjects analyzed, the inventors detected small percentages (0.02-0.26%) of SARS-CoV-2-reactive total CD19⁺ B cells, which were subsequently used to prepare 5′ transcriptome, immunoglobulin (Ig) VDJ, and antigen-specific probe feature libraries for sequencing (FIG. 1a, b). The inventors detected increased percentages of antigen-specific B cells within the memory B cell (MBC) compartment FIG. 1B, CD19⁺CD27⁺CD38^{int}), though the inventors sorted on total CD19⁺ antigen-specific B cells to ensure adequate coverage of all potential reactive B cells and to optimize sequence library preparation and downstream analysis as the antigen-specific population was rare. The inventors integrated data from 17 subjects with high-quality sequencing results using Seurat to remove batch effects and identified 12 transcriptionally distinct B cell clusters based on transcriptional expression profiles (FIG. 1c). It was immediately evident that B cells specific to the spike, NP, ORF7a, and ORF8 were found amongst multiple B cell subsets, with spike-specific B cells substantially enriched in clusters 4, 5, 7, and 9 (FIGS. 1d, e). Analysis of Ig isotypes and degree of Ig variable heavy chain somatic hypermutations (VH SHM) suggested that clusters 0-2, 8, 10, and 11 represented naïve- or innate-like B cell clusters predominantly composed of IgM and IgD B cells. In contrast, clusters 3, 4, 5, 6, 7, 9, and 12 strongly indicated B cell subsets more similar to MBCs or plasma cells, as they exhibited a higher degree of class switch recombination (CSR) and/or increased numbers of VH SHM (FIG. 10. The inventors detected variation in the percentage of total cells sorted per cluster amongst individual patients, reflecting differences in the biology of individual responses to SARS-CoV-2, as the inventors expand upon later (FIG. 6a). No major differences in VH gene usage across clusters were evident, though the inventors identified enrichment of VH1-24 in cluster 7, which the inventors later identify as exclusively utilized by spike-reactive B cells (FIG. 6b).

[0421] The inventors next addressed whether the probe intensities generated from the feature libraries correlated with antigen-specific reactivity by plotting intensities for distinct probes against one another to observe true specificity (cells that fall directly onto the x or y axis) vs. non-specific binding (cells that fall on the diagonal). The inventors observed hundreds of cells specific to the spike, ORF8, NP, and to a lesser degree, ORF7a (FIG. 1g). For clusters 1, 2, and 8, the inventors observed that the majority of cells were not uniquely specific for any one probe, and instead tended to bind more than one probe in a polyreactive or non-specific manner, consistent with innate-like B cells¹⁸. Finally, clusters 4, 5, 6, 7, and 9 exhibited highly specific binding toward the spike, NP, and ORF8, with the majority targeting the spike (FIG. 6c). Together, the data suggest the B cell response to SARS-CoV-2 is comprised of multiple functionally distinct B cell subsets enriched for binding to distinct viral targets.

[0422] 2. SARS-CoV-2-Specific B Cell Subsets

[0423] To discern the identities of distinct B cell subsets, the inventors further analyzed Ig repertoire, differentially expressed genes, and performed pseudotime analyses of integrated clusters. For pseudotime analysis, the inventors rooted the data on cluster 2, as cells within this cluster expressed Ig genes with little to no SHM or CSR (FIG. 1f) and displayed low probe reactivity (FIG. 6c), suggesting this subset is comprised of true naïve B cells. Pseudotime analysis rooted on cluster 2 identified clusters 0, 1, and 8 in various stages of differentiation, suggestive of recent activation (FIG. 2a-b). As they displayed little CSR or SHM (FIG. 10, the inventors therefore categorized these subsets as innate-like or possibly germinal center independent. Clusters 3 and 5 appeared to be specific IgM memory subsets (FIG. 1f, FIG. 6c), while clusters 4, 7, 9, and 12 displayed high specificity, CSR, and SHM, demonstrating an affinity-matured memory phenotype (FIG. 1f, FIG. 6c). As naïve B cells and MBCs are quiescent, clusters 4, 5, 7, and 9 were similar to cluster 2 in pseudotime analysis (FIG. 2a-b)¹⁹. Lastly, cluster 6 was of interest as these cells displayed the greatest frequency of SHM and IgA CSR, and may have arisen in the context of a mucosal immune response.

[0424] In-depth analysis of select genes including those related to B cell fate, MBC differentiation and maintenance, and long-lived plasma cells (LLPCs) helped to further reveal the identities of select clusters. Genes associated with MBCs (cd27, cd38, cd86, pon2af), repression of apoptosis (mcl1), early commitment to B cell fate (zeb2), repression of LLPC fate (spiB, pax5, bach2), and early B cell activation and proliferation (bach2) confirmed clusters 3, 4, 5, 7 and 9 as MBCs though with varying degrees of differentiation, CSR, and SHIM (FIG. 2b-c, FIG. 7). Notably, the inventors identified upregulation of the transcription factor hhex in cluster 7, which has recently been shown to be involved in MBC differentiation in mice (FIG. 7)²⁰. Lastly, cluster 12 appeared to be LLPCs or precursors thereof by expression of genes associated with LLPC fate, including prdm1, xbp1, and manf (FIG. 7)^{19,21,22}. Together with the antigen-specific probe data (FIG. 1), these results confirm that clusters representing classical MBCs are enriched for spike binding while B cells targeting internal proteins are enriched in activated naïve and innate-like B cell subsets.

[0425] 3. SARS-CoV-2-Specific Ig Repertoire

[0426] The properties of B cells targeting immunogenic targets such as ORF8 and NP compared to the spike are unknown. The inventors further analyzed isotype frequencies, VH SHM, VII gene usages, and frequencies of B cells against these targets within distinct B cell subsets. The majority of antigen-specific B cells were of the IgM isotype with a limited degree of CSR. There were no major differences between the isotypes of B cells specific to these distinct targets, with the majority of class-switched cells being of the IgG1 isotype. Consistent with a de novo response against the novel SARS-CoV-2, the inventors observed that the majority of antigen-specific B cells had little to no VH SHM, though spike-reactive B cells displayed slightly increased amounts of SHM. Spike-specific B cells were primarily enriched in MBC and LLPC-like clusters 4, 5, 7, 9, and 12 while NP- and ORF8-specific B cells were largely found within naïve- and innate-like clusters but also within MBC clusters (FIG. 3a-1). Lastly, the inventors did not observe differences in heavy chain (HC) or light chain (LC) complementarity determining region 3 length by antigen targeting (FIG. 8a-b), though the inventors did observe that HC and LC isoelectric points (pI) for spike-reactive B cells were generally lower than NP- or ORF8-reactive B cells (FIG. 8c-d), and LC SHM was greater for spike-reactive B cells (FIG. 8e).

[0427] The inventors next analyzed the VH gene usages of spike-, NP-, and ORF8-specific B cells and identified the most common VH usages per reactivity (represented by larger squares on each tree map) as well as shared VH usages across reactivities (shown by matching colors; FIG. 3m-p). Strikingly, the inventors identified usage of particular VH gene loci that did not overlap between spike- and RBD-reactive B cells (shown in black). VH1-24, VH3-7, and VH3-9 were the highest represented VH gene usages exclusively associated with non-RBD spike reactivity, and VH1-24 usage was enriched in cluster 7, an MBC-like cluster (FIG. 3m-n, FIG. 6b). These results were confirmed by mAb data, which identified spike-specific mAbs utilizing VH1-24 and VH3-7 that did not bind to the RBD (Extended Data Table 3). Unique LC V gene usages were also evident amongst antigen-specific cells (FIG. 8f-i).

[0428] Finally, public B cell clones were of interest as the epitopes bound can be targeted by multiple people and thus represent important vaccine targets. The inventors identified five novel public clones from this dataset, three of which were present in two separate subjects, one that was present amongst three subjects, and one amongst four subjects (Extended Data Table 4). Four of the clonal pools were specific to the spike protein, and the remaining clone to NP. The majority of clonal pool members were identified in MBC-like clusters 3, 4, 5, 7, and 9, suggesting that B cells specific to public epitopes can be established within stable MBC compartments.

[0429] 4. Monoclonal Antibody Binding and Neutralization

[0430] To simultaneously validate the specificity of the approach and investigate the properties of mAbs targeting distinct SARS-CoV-2 viral epitopes, the inventors synthesized and characterized the binding and neutralization ability of 90 mAbs from the single cell dataset (Extended Data Table 3). B cells exhibiting variable probe binding intensities toward distinct antigens were chosen as candidates for mAb generation, as well as B cells that tended to bind multiple probes (exhibiting non-specificity or polyreactivity). MAbs cloned were representative of various clusters, reactivities, VH gene usages, mutational load, and isotype usages (FIG. 4a, Extended Data Table 3). Representative mAbs generated from cells specific to the spike, NP, and ORF8 exhibited high affinity by ELISA, though probe intensities did not meaningfully correlate with apparent affinity (K_{D}) (FIG. 4b, 9a). Only a small percentage of cloned mAbs to the spike, NP, and ORF8 exhibited non-specific binding (FIG. 4b). Notably, non-specific multi-probe-binding cells were reactive to the PE-SA-oligo probe conjugate and were largely polyreactive (FIG. 9b-g).

[0431] While mAbs targeting the RBD of the spike are typically neutralizing, little is known regarding the neutralization capabilities of mAbs targeting non-RBD regions of the spike, ORF8 and NP. The inventors addressed the neutralization ability of all synthesized mAbs using a live virus plaque assay and determined that all mAbs cloned against NP and ORF8 were non-neutralizing, while mAbs against the RBD and other epitopes of the spike were largely neutralizing at varying degrees of potency (FIG. 4c-d). As anti-spike mAbs were predominantly neutralizing and enriched in memory, these MBC subsets may serve as a biomarker for superior immunity to SARS-CoV-2.

[0432] 5. Antigen Targeting and Clinical Features

[0433] Previous studies from the inventors' group and others have suggested serum antibody titers correlate with sex, SARS-CoV-2 severity, and age^{6,14,23}. The inventors therefore investigated the frequencies of SARS-CoV-2-reactive B cells to assess whether reactivity toward particular SARS-CoV-2 antigens correlated with clinical parameters. By both serology and ELISpot, the inventors identified that B cell responses against the spike/RBD and NP were immunodominant, though ORF8 antigen targeting was substantial (FIG. 5a, b). Consistent with the single cell dataset, spike-specific B cells were enriched in memory by ELISpot (FIG. 5b).

[0434] The inventors next analyzed the distribution of B cell subsets and frequencies of B cells specific to the spike, NP, ORF7a, and ORF8 in sets of patients stratified by age, sex, and duration of symptoms from the single cell dataset. The inventors normalized antigen probe signals by a centered log-ratio transformation individually for each subject; all B cells were clustered into multiple probe hit groups according to their normalized probe signals, and cells that were negative to all probes or positive to all probes (non-specific) were excluded from the analysis. The inventors identified substantial variation in antigen targeting amongst individual subjects (FIG. 5c). As subject age increased, the percentages of spike-reactive B cells relative to B cells targeting internal proteins decreased, and age positively correlated with increased percentages of ORF8-reactive B cells (FIG. 5d-e). Similarly, female subjects and subjects experiencing a longer duration of symptoms displayed reduced spike targeting relative to internal proteins (FIG. 5d). Consistent with spike-reactive B cells enriched in MBC clusters, patient who were younger, male, or experienced a shorter duration of symptoms exhibited increased targeting of the spike and increased proportions of MBC subsets (FIG. 5d, f). Accordingly, older patients, female patients, and patients with a longer duration of symptoms exhibited reduced levels of VH gene SHM (FIG. 5g-i).

[0435] In summary, this study highlights the diversity of B cell subsets expanded upon novel infection with SARS-CoV-2 Using this approach, the inventors identified that B cells against the spike, ORFS, and NP differ in their ability to neutralize, derive from functionally distinct and differentially adapted B cell subsets, and correlate with clinical parameters such as age, sex, and symptom duration.

[0436] B. Discussion

[0437] The COVID-19 pandemic continues to pose one of the greatest public health and policy challenges in modern history, and robust data on long-term immunity is critically needed to evaluate future decisions regarding COVID-19 responses. This approach combines three powerful aspects of B cell biology to address human immunity to SARS-CoV-2: B cell transcriptome, Ig sequencing, and recombinant mAb characterization. This approach enables the identification of potently neutralizing antibodies and the characteristics of the B cells that generate them. Importantly, the inventors showed that antibodies targeting key protective spike epitopes are enriched within canonical MBC populations.

[0438] Identification of multiple distinct subsets of innate-like B cells, MBCs, and apparent LLPC precursors illustrates the complexity of the B cell response to SARS-CoV-2, revealing an important feature of the immune response against a novel pathogen. The B cell clusters herein may provide biomarkers in the form of distinct B cell populations that can be used to evaluate future responses to various vaccine formulations. In particular, the identification of LLPC precursors in the blood following infection and vaccination has been long sought after, as they serve as a bonafide marker of long-lived immunity^{24,25}. Future studies elucidating distinct identities and functions of these subsets are necessary and will provide key insights into B cell immunology.

[0439] The inventors identified that older patients, female patients, and patients experiencing a longer duration of symptoms tended to display reduced proportions of MBC clusters and reduced VH SHM, consistent with a previous study that identified limited germinal center formation upon SARS-CoV-2 infection²⁶. Notably, older patients had increased percentages of ORFS-specific B cells, which the inventors identified as exclusively non-neutralizing. Mechanistically, these observations may be explained by reduced adaptability of B cells or increased reliance on CD4 T cell help for B cell activation, which have been observed in aged individuals upon viral infections^{27,28}. Furthermore, T cell responses to SARS-CoV-2 ORF proteins are prevalent in convalescent COVID-19 patients, and recent studies suggest impaired T cell responses in aged COVID-19 patients impact antibody responses^{10,29,30,42}. More research is warranted to definitively determine whether B cell targeting of distinct SARS-CoV-2 antigens correlates with age and disease severity. Addressing these questions will be critical for determining correlates of protection and developing a vaccine capable of protecting the most vulnerable populations.

[0440] C. Materials & Methods

[0441] 1. Study Cohort and Sample Collection

[0442] Clinical information for patients included in the study is detailed in Extended Data Table 1 and Extended Data Table 2. No statistical methods were used to predetermine sample size, experiments were not randomized, and investigators were unblinded. Leukoreduction filter donors were 18 years of age or older, eligible to donate blood as per standard University of Chicago Medicine Blood Donation Center guidelines, had a documented COVID-19 polymerase chain reaction (PCR) positive test, and complete resolution of symptoms at least 28 days prior to donation. PBMCs were collected from leukoreduction filters within 2 hours post-collection and flushed from the filters using sterile 1× Phosphate-Buffered Saline (PBS, Gibco) supplemented with 0.2% Bovine Serum Albumin (BSA, Sigma). Lymphocytes were purified by Lymphoprep Ficoll gradient (Thermo Fisher) and contaminating red blood cells were lysed by ACK buffer (Thermo Fisher). Cells were frozen in Fetal Bovine Serum (FBS, Gibco) with 10% Dimethyl sulfoxide (DMSO, Sigma) prior to downstream analysis. On the day of sorting, B cells were enriched using the human pan B cell EasySep™ enrichment kit (STEMCELL).

[0443] 2. Recombinant Proteins and Probe Generation

[0444] Sequences for the spike and RBD proteins as well as details regarding their expression and purification have been previously described^{31,32}. Proteins were biotinylated for 2 hours on ice using EZ-Link™ Sulfo-NHS-Biotin, No-Weigh™ Format (Thermo Fisher) according to the manufacturer's instructions, unless previously Avi-tagged and biotinylated (ORF7a and ORF8 proteins, Fremont laboratory). Truncated cDNAs encoding the Ig-like domains of ORF7a and ORF8 were inserted into the bacterial expression vector pET-21(a) in frame with a biotin ligase recognition sequence at the c-terminus (GLND1FEAQKIEWHE). Soluble recombinant proteins were produced as described previously³³. In brief, inclusion body proteins were washed, denatured, reduced, and then renatured by rapid dilution following standard methods³⁴. The refolding buffer consisted of 400 mM arginine, 100 mM Tris-HCl, 2 mM EDTA, 200 μM ABESF, 5 mM reduced glutathione, and 500 μM oxidized glutathione at a final pH of 8.3. After 24 hours, the soluble-refolded protein was collected over a 10 kDa ultrafiltration disc (EMD Millipore, PLGC07610) in a stirred cell concentrator and subjected to chromatography on a HiLoad 26/60 Superdex S75 column (GE Healthcare). Site-specific biotinylation with BirA enzyme was done following the manufacture's protocol (Avidity) except that the reaction buffer consisted of 100 mM Tris-HCl (pH 7.5) 150 mM NaCl, with 5 mM MgCl2 in place of 0.5 M Bicine at pH 8.3. Unreacted biotin was removed by passage through a 7K MWCO desalting column (Zeba spin, Thermo Fisher). Full-length SARS-CoV-2 NP was cloned into pET21a with a hexahistidine tag and expressed using BL21(DE3)-RIL E. coli in Terrific Broth (bioWORLD). Following overnight induction at 25° C., cells were lysed in 20 mM Tris-HCl pH 8.5, 1 M NaCl, 5 mM β-mercaptoethanol, and 5 mM imidazole for nickel-affinity purification and size exclusion chromatography. Biotinylated proteins were then conjugated to Biolegend TotalSeq™ PE streptavidin-(PE-SA) oligos at a 0.72:1 molar ratio of antigen to PE-SA. The amount of antigen was chosen based on a fixed amount of 0.5 μg PE-SA and diluted in a final volume of 10 μL. PE-SA was then added gradually to 10 μl biotinylated proteins 5 times on ice, 1 μl PE-SA (0.1 mg/ml stock) every 20 minutes for a total of 5 μl (0.5 μg) PE-SA. The reaction was then quenched with 5 μl 4 mM Pierce™ biotin (Thermo Fisher) for 30 minutes for a total probe volume of 20 μL. Probes were then used immediately for staining.

[0445] 3. Antigen-Specific B Cell Sorting

[0446] PBMCs were thawed and B cells were enriched using EasySep™ pan B cell magnetic enrichment kit (STEMCELL). B cells were stained with a panel containing CD19 PE-Cy7 (Biolegend), IgM APC (Southern Biotech), CD27 BV605 (Biolegend), CD38 BB515 (BD Biosciences), and CD3 BV510 (BD Biosciences). B cells were stained with surface stain master mix and each COVID-19 antigen probe for 30 minutes on ice in 1×PBS supplemented with 0.2% BSA and 2 mM Pierce Biotin. Cells were stained with probe at a 1:100 dilution (NP, ORF7a, ORF8, RBD) or 1:200 dilution (spike). Cells were subsequently washed with 1×PBS BSA and stained with Live/Dead BV510 (Thermo Fisher) in 1×PBS for 15 minutes. Cells were washed again and re-suspended at a maximum of 4 million cells/mL in 1×PBS supplemented with 0.2% BSA and 2 mM Pierce Biotin for downstream cell sorting using the MACSQuantTyto cartridge sorting platform (Miltenyi). Cells that were viable/CD19⁺/antigen-PE⁺ were sorted as probe positive. The PE⁺ gate was drawn by use of FMO controls. Cells were then collected from the cartridge sorting chamber and used for downstream 10× Genomics analysis.

[0447] 4. 10× Genomics Library Construction

[0448] VDJ, 5′, and probe feature libraries were prepared using the 10× Chromium System (10× Genomics, Pleasanton, CA). The Chromium Single Cell 5′ Library and Gel Bead v2 Kit, Human B Cell V(D)J Enrichment Kit, and Feature Barcode Library Kit were used. All steps were followed as listed in the manufacturer's instructions. Specifically, user guide CG000186 Rev D was used. Final libraries were pooled and sequenced using the NextSeq550 (Illumina, San Diego, CA) with 26 cycles apportioned for read 1, 8 cycles for the i7 index, and 134 cycles for read 2.

[0449] 5. Computational Analyses for Single Cell Sequencing Data

[0450] The inventors adopted Cell Ranger (version 3.0.2) for raw sequencing processing, including 5′ gene expression analysis, antigen probe analysis, and immunoprofiling analysis of B cells. Based on Cell Ranger output, the inventors performed downstream analysis using Seurat (version 3.2.0, an R package, for transcriptome, cell surface protein and antigen probe analysis) and IgBlast (version 1.15, for immunoglobulin gene analysis). For transcriptome analysis, Seurat was used for cell quality control, data normalization, data scaling, dimension reduction (both linear and non-linear), clustering, differential expression analysis, batch effects correction, and data visualization. Unwanted cells were removed according to the number of detectable genes (number of genes <200 or >2500 were removed) and percentage of mitochondrial genes for each cell. A soft threshold of percentage of mitochondrial genes was set to the 95^{th} percentile of the current dataset distribution, and the soft threshold was subject to a sealing point of 10% as the maximum threshold in the case of particularly poor cell quality. Transcriptome data were normalized by a log-transform function with a scaling factor of whereas cell surface protein and antigen probe were normalized by a centered log-ratio (CLR) normalization. The inventors used variable genes in principal component analysis (PCA) and used the top 15 principal components (PCs) in non-linear dimension reduction and clustering. High-quality cells were then clustered by Louvain algorithm implemented in Seurat under the resolution of 0.6. Differentially expressed genes for each cell cluster were identified using a Wilcoxon rank-sum test implemented in Seurat. Batch effects correction analysis was performed using an Anchor method implemented in Seurat to remove batch effects across different datasets. All computational analyses were performed in R (version 3.6.3).

[0451] 6. Trajectory and Pseudotime Analyses

[0452] Trajectory analyses were performed using Monocle 3 (version 0.2.2)^{35,36}, Seurat 3, and the SeuratWrappers package (version 0.2.0)³⁷. Cells from multiple subjects were integrated to remove batch effects using Seurat, and all cells were clustered into two non-connected partitions. The inventors then performed trajectory analysis on the main partition containing the majority of the cells and clusters (clusters 0-11). Pseudotime analysis of cells was also inferred from this major partition using Monocle3. The root node of the pseudotime analysis was set to cluster 2, a naïve B cell subset with the lowest degree of VH gene SHIM and CSR.

[0453] 7. Selection of Antibodies for mAb Synthesis

[0454] Representative antibodies from each subject were chosen for synthesis by choosing random samplings of B cells that bound to a given antigen probe with higher intensity relative to all other probes. B cells with varying ranges of probe-binding intensities were chosen for confirmation by ELISA. B cells binding to all probes in a polyreactive manner were also chosen and validated for polyreactivity by polyreactivity ELISA (see methods below).

[0455] 8. Monoclonal Antibody Generation

[0456] Immunoglobulin heavy and light chain genes were obtained by 10× Genomics VDJ sequencing analysis and monoclonal antibodies (mAbs) were synthesized by Integrated DNA Technologies. Cloning, transfection, and mAb purification have been previously described³⁸. Briefly, sequences were cloned into human IgG1 expression vectors using Gibson assembly, and heavy and light genes were co-transfected into 293T cells (Thermo Fisher). Secreted mAbs were then purified from the supernatant using protein A agarose beads (Thermo Fisher).

[0457] 9. Enzyme-Linked Immunosorbent Assay (ELISA)

[0458] High-protein binding microtiter plates (Costar) were coated with recombinant SARS-CoV-2 proteins at 2 μg/ml in 1× PBS overnight at 4° C. Plates were washed the next morning with 1×PBS 0.05% Tween and blocked with 1× PBS containing 20% fetal bovine serum (FBS) for 1 hour at 37° C. Antibodies were then serially diluted 1:3 starting at 10 μg/ml and incubated for 1 hour at 37° C. Horseradish peroxidase (HRP)-conjugated goat anti-human IgG antibody diluted 1:1000 (Jackson Immuno Research) was used to detect binding of mAbs, and plates were subsequently developed with Super Aquablue ELISA substrate (eBiosciences). Absorbance was measured at 405 nm on a microplate spectrophotometer (BioRad). To standardize the assays, control antibodies with known binding characteristics were included on each plate and the plates were developed when the absorbance of the control reached 3.0° Dos units. Data are representative of 2-4 independent experiments with 2 technical replicates.

[0459] 10. Polyreactivity ELISA

[0460] Polyreactivity ELISAs were performed as previously described^{39,40}. High-protein binding microtiter plates (Costar) were coated with 10 μg/ml calf thymus dsDNA (Thermo Fisher), 2 μm/ml Salmonella enterica serovar Typhimurium flagellin (Invitrogen), 5 μg/ml human insulin (Sigma-Aldrich), 10 μg/ml KLH (Invitrogen), and 10 μg/ml Escherichia coli LPS (Sigma-Aldrich) in 1×PBS. Plates were coated with 10 μg/ml cardiolipin in 100% ethanol and allowed to dry overnight. Plates were washed with water and blocked with 1× PBS/0.05% Tween/1 mM EDTA. MAbs were diluted 1 μg/ml in PBS and serially diluted 4-fold, and added to plates for 1.5 hours. Goat anti-human IgG-HRP (Jackson Immunoresearch) was diluted 1:2000 in PBS/0.05% Tween/1 mM EDTA and added to plates for 1 hour. Plates were developed with Super Aquablue ELISA substrate (eBioscience) until the positive control mAb, 3H9⁴¹, reached an OD₄₀₅ of 3. MAbs were screened once for polyreactivity with 2 technical replicates.

[0461] 11. Memory B Cell Stimulations and Enzyme-Linked Immunospot Assays (ELISpot)

[0462] MBC stimulations were performed on PBMCs collected from subjects in the convalescent cohort. To induce MBC differentiation into antibody secreting cells, 1×10⁶ PBMCs were stimulated with 10 ng/ml Lectin Pokeweed Mitogen (Sigma-Aldrich), 1/100,000 Protein A from Staphylococcus aureus, Cowan Strain (Sigma-Aldrich), and 6 μg/ml CpG (Invitrogen) in complete RPMI in an incubator at 37° C./5% CO₂ for 5 days. After stimulation, cells were counted and added to ELISpot white polystyrene plates (Thermo Fisher) coated with 4 μg/ml of SARS-CoV-2 spike that were blocked with 200 μl of complete RPMI. ELISpot plates were incubated with cells for 16 hours overnight in an incubator at 37° C./5% CO₂. After the overnight incubation, plates were washed and incubated with anti-IgG-biotin and/or anti-IgA-biotin (Mabtech) for 2 hours at room temperature. After secondary antibody incubation, plates were washed and incubated with streptavidin-alkaline phosphatase (Southern Biotech) for 2 hours at room temperature. Plates were washed and developed with NBT/BCIP (Thermo Fisher Scientific) for 2-10 minutes, and reactions were stopped by washing plates with distilled water and allowed to dry overnight before counting. Images were captured with Immunocapture 6.4 software (Cellular Technology Ltd.), and spots were manually counted. Experiments were performed once with 2 technical replicates due to limited cell availability.

[0463] 12. Neutralization Assay

[0464] The SARS-CoV-2/UW-001/Human/2020/Wisconsin (UW-001) virus was isolated from a mild case in February 2020 and used to assess neutralization ability of mAbs. Virus (˜500 plaque-forming units) was incubated with each mAb at a final concentration of 10 μg/ml. After a 30-minute incubation at 37° C., the virus/antibody mixture was used to inoculate Vero E6/TMPRSS2 cells seeded a day prior at 200,000 cells per well of a TC12 plate. After 30 minutes at 37° C., cells were washed 3 times to remove any unbound virus, and media containing antibody (10 μg/ml) was added back to each well. 2 days after inoculation, cell culture supernatant was harvested and stored at −80° C. until needed. A non-relevant Ebola virus GP mAb and PBS were used as controls.

[0465] To determine the amount of virus in the cell culture supernatant of each well, a standard plaque-forming assay was performed. Confluent Vero E6/TMPRSS2 cells in a TC12 plate were infected with supernatant (undiluted, 10-fold dilutions from 10⁻¹ to 10⁻⁵) for 30 minutes at 37° C. After the incubation, cells were washed 3 times to remove unbound virus and 1.0% methylcellulose media was added over the cells. After an incubation of 3 days at 37° C., the cells were fixed and stained with crystal violet solution in order to count the number plaques at each dilution and determine virus concentration given as plaque-forming units (PFU)/ml. A stringent cutoff for neutralization was chosen as 100-fold greater neutralization relative to the negative control mAb. MAbs were screened once for neutralization.

[0466] 13. Statistical Analysis

[0467] All statistical analyses were performed using Prism (GraphPad Prism version 8.0) or IMP Pro software (version 15.1.0). Sample sizes (n) are indicated directly in the figures or in the corresponding figure legends and specific tests for statistical significance used are indicated in the corresponding figure legends. P values less than or equal to 0.05 were considered significant. *p<0.05, **p<0.01, ***p<0.001, ****p<0.0001. All measures analyzed within the single cell dataset were analyzed repeatedly within the same integrated dataset, and independent preparations of mAb confirmed consistent binding patterns

Extended Data Table 1. Individual patient information.

| | | | | Duration | Symptom | |
|---|---|---|---|---|---|---|
| | | | | of | start to | |
| Subject | | | | symptoms | donation | |
| ID | Age | Sex | Reported symptoms* | (days) | (days) | Available data |
| 24 | 34 | M | Fatigue, cough, SOB, SC, fever, headache, BAP, | 12 | 41 | Single cell probe binding, ELISPOT, serology |
| | | | diarrhea, LOS, LOT | | | |
| 20 | 31 | M | Fatigue, cough, SOB, SC, fever, headache, BAP, | 19 | 48 | Single cell probe binding, ELISPOT, serology |
| | | | LOS, LOT | | | |
| 564 | 24 | F | Fatigue, cough, SOB, SC, ST, fever, headache, | 32 | 60 | Single cell probe binding, ELISPOT, serology |
| | | | BAP, diarrhea, LOS, LOT | | | |
| 144 | 56 | M | Fatigue, cough, SC, ST, headache, BAP, LOS | 23 | 54 | Single cell probe binding, ELISPOT, serology |
| 214 | 47 | M | Fatigue, cough, SOB, SC, ST, headache, BAP, | 24 | 59 | Single cell probe binding, ELISPOT, serology |
| | | | LOS, LOT | | | |
| 171 | 37 | F | Fatigue, cough, SOB, SC, fever, headache, BAP, | 16 | 44 | Single cell probe binding, ELISPOT, serology |
| | | | diarrhea, LOS, LOT | | | |
| 92 | 35 | M | Fatigue, cough, SC, ST, fever, headache, BAP | 16 | 47 | Single cell probe binding, ELISPOT, serology |
| 48 | 45 | F | Fatigue, cough, SOB, SC, ST, fever, headache, AP, | 8 | 40 | Single cell probe binding, ELISPOT, serology |
| | | | diarrhea, LOS, LOT | | | |
| 537 | 36 | M | Fatigue, cough, fever, BAP | 14 | 59 | Single cell probe binding, ELISPOT, serology |
| 586 | 32 | F | Fatigue, cough, SOB, SC, headache, BAP, AP, | 17 | 61 | Single cell probe binding, ELISPOT, serology |
| | | | diarrhea | | | |
| 210 | 47 | M | Fatigue, cough, SOB, fever, headache, BAP, LOS, | 7 | 41 | Single cell probe binding, ELISPOT, serology |
| | | | LOT | | | |
| 376 | 36 | F | Diarrhea, LOS, LOT | 7 | 48 | Single cell probe binding, ELISPOT, serology |
| 305 | 43 | F | Fatigue, cough, SC, ST, fever, headache, BAP, | 4 | 47 | Single cell probe binding, ELISPOT, serology |
| | | | LOS, LOT | | | |
| 116 | 65 | F | Cough, SOB, fever, LOS, LOT | 18 | 49 | Single cell probe binding, ELISPOT, serology |
| 166 | 42 | F | Fatigue, cough, SOB, SC, fever, headache, BAP, | 17 | 55 | Single cell probe binding, ELISPOT, serology |
| | | | diarrhea, LOS, LOT | | | |
| 155 | 47 | F | Fatigue, cough, SOB, ST, fever, BAP, LOS, LOT | 29 | 64 | Single cell probe binding, serology |
| 609 | 26 | F | Fatigue, SOB, ST, fever, headache, BAP, LOS, | 7 | 57 | Single cell probe binding, serology |
| | | | LOT | | | |
| 282 | 34 | F | Fatigue, cough, SOB, fever, BAP, AP, LOS | 24 | 54 | ELISPOT, serology |
| 326 | 36 | F | Fatigue, cough, SC, fever, headache, BAP, AP, | 15 | 47 | ELISPOT, serology |
| | | | LOS, LOT | | | |
| 356 | 51 | F | Fatigue, cough, ST, fever, headache, BAP, AP, | 14 | 43 | ELISPOT, serology |
| | | | diarrhea, LOS, LOT | | | |
| 373 | 48 | M | Fatigue, fever, headache, BAP | 7 | 39 | ELISPOT, serology |
| 402 | 32 | F | Fatigue, cough, SOB, fever, headache, BAP, AP, | 11 | 44 | ELISPOT, serology |
| | | | diarrhea, LOS, LOT | | | |
| 65 | 40 | F | Fatigue, SC, fever, headache, BAP, diarrhea, LOS, | 13 | 47 | ELISPOT, serology |
| | | | LOT | | | |
| 423 | 58 | M | Fatigue | 5 | 38 | ELISPOT, serology |
| 558 | 56 | F | Fatigue, cough, SOB, LOS | 11 | 46 | ELISPOT, serology |

*SOB = shortness of breath; SC = sinus congestion; ST = sore throat; BAP = body aches and pain; AP = abdominal pain; LOS = loss of smell; LOT = loss of taste

Extended Data Table 3.
MAbs generated from single B cell heavy and light chain gene sequences.

| | | | | | | | | HC CDR3 | LC CDR3 | |
|---|---|---|---|---|---|---|---|---|---|---|
| B cell | Clonal | | | DH | JH | LC V | LC J | AA | AA | |
| clone | Pool | Antigen | VH gene | gene | gene | gene | gene | sequence | sequence | Cluster |
| S144- | 1 | Spike | 3-23*01 | N/A | 4*02 | k3-20* | k1*01 | AKGSSTA | QEYGSSRM | 5 |
| 121 | | | | | | 01 | | RPYYFDY | (SEQ ID | |
| | | | | | | | | (SEQ ID | NO: 1802) | |
| | | | | | | | | NO: 1801) | | |
| S155- | 1 | Spike | 3-23*01 | 6-13*01 | 4*02 | k3-20* | k1*01 | VKGSAAA | QQYGNSRI | 3 |
| 37 | | | | | | 01 | | RPYYFDY | (SEQ ID | |
| | | | | | | | | (SEQ ID | NO: 1804) | |
| | | | | | | | | NO: 1803) | | |
| S210- | 2 | Spike | 3-30- | 1-7*01 | 4*02 | k3-20* | k3*01 | ARGHGNY | QQYGSSPLT | 5 |
| 896 | | | 3*01 | | | 01 | | LTYFDY | (SEQ ID | |
| | | | | | | | | (SEQ ID | NO: 284) | |
| | | | | | | | | NO: 1805) | | |
| S376- | 2 | Spike | 3-30- | 1-26*01 | 4*02 | k3-20* | k4*01 | ARGRGNY | QQYGGSLT | 7 |
| 2486 | | | 3*01 | | | 01 | | FTYFDY | (SEQ ID | |
| | | | | | | | | (SEQ ID | NO: 1807) | |
| | | | | | | | | NO: 1806) | | |
| S166- | 3 | Spike | 3-7*03 | 6-19*01 | 4*02 | 13-1* | 12*01 | ARDSIAV | QAWDSSTVV | 5 |
| 2620 | | | | | | 01 | | AGGLDY | (SEQ ID | |
| | | | | | | | | (SEQ ID | NO: 698) | |
| | | | | | | | | NO: 1808) | | |
| S166- | 3 | Spike | 3-7*03 | 6-19*01 | 4*02 | 13-1* | 12*01 | ARDGIAV | QAWDSSTVV | 4 |
| 1318 | | | | | | 01 | | AGGFDY | (SEQ ID | |
| | | | | | | | | (SEQ ID | NO: 698) | |
| | | | | | | | | NO: 1809) | | |
| S171- | 3 | Spike | 3-7*01 | 6-19*01 | 4*02 | 13-1* | 12*01 | ARDGIAV | QAWDSSTVV | 9 |
| 1150 | | | | | | 01 | | AGGLDY | (SEQ ID | |
| | | | | | | | | (SEQ ID | NO: 698) | |
| | | | | | | | | NO: 1810) | | |
| S210- | 3 | Spike | 3-7*01 | 6-19*01 | 4*02 | 13-1* | 12*01 | ARDGIAV | QAWDSSTSVV | 4 |
| 852 | | | | | | 01 | | AGGFDY | (SEQ ID | |
| | | | | | | | | (SEQ ID | NO: 1811) | |
| | | | | | | | | NO: 1809) | | |
| S305- | 3 | Spike | 3-7*03 | 6-19*01 | 4*02 | 13-1* | 12*01 | ARDSIAV | QAWDSSTNVV | 5 |
| 968 | | | | | | 01 | | AGGFDY | (SEQ ID | |
| | | | | | | | | (SEQ ID | NO: 1813) | |
| | | | | | | | | NO: 1812) | | |
| S564- | 4 | NP | 3-7*01 | 1-26*01 | 4*02 | k3-15* | k2*01 | ARGDGSN | QQYNYWYT | 5 |
| 128 | | | | | | 01 | | SGIYFDS | (SEQ ID | |
| | | | | | | | | (SEQ ID | NO: 1815) | |
| | | | | | | | | NO: 1814) | | |
| S469- | 4 | NP | 3-7*03 | 6-6*01 | 4*02 | k3-15* | k2*01 | ARGGGSS | QQYNYWYT | 5 |
| 373 | | | | | | 01 | | SGLYFES | (SEQ ID | |
| | | | | | | | | (SEQ ID | NO: 1815) | |
| | | | | | | | | NO: 1816) | | |
| S144- | 5 | Spike | 5-51*01 | 2-21*02 | 4*02 | k1-5* | k1*01 | ARLFCGG | QQYNTYPRT | 7 |
| 292 | | | | | | 01 | | DCPFDY | (SEQ ID | |
| | | | | | | | | (SEQ ID | NO: 1818) | |
| | | | | | | | | NO: 1817) | | |
| S2141- | 5 | Spike | 5-51*01 | 2-21*02 | 4*02 | k1-5* | k1*01 | ARQFCGG | QQYNSYPRT | 8 |
| 65 | | | | | | 01 | | DCPFDY | (SEQ ID | |
| | | | | | | | | (SEQ ID | NO: 1820) | |
| | | | | | | | | NO: 1819) | | |
| S144- | 5 | Spike | 5-51*01 | 3-10*01 | 4*02 | k1-5* | k2*01 | ARPNYYG | QQYNSYYT | 5 |
| 1364 | | | | | | 01 | | SGSPPGY | (SEQ ID | |
| | | | | | | | | (SEQ ID | NO: 1822) | |
| | | | | | | | | NO: 1821) | | |
| S210- | 5 | Spike | 5-51*01 | 3-10*01 | 4*02 | k3-20* | k1*01 | ARPFYYG | QLFGSSPTWT | 4 |
| 1139 | | | | | | 01 | | SESPPGY | (SEQ ID | |
| | | | | | | | | (SEQ ID | NO: 1824) | |
| | | | | | | | | NO: 1823) | | |

Extended Data Table 2. Distribution of clinical
parameters for patients included in the study.

| | |
|---|---|
| Median Age | 40 |
| Mean Age | 42 |
| Mode Age | 47 |
| Range Age | 24-65 |
| Number of Males | 9 |
| Number of Females | 16 |
| Median Duration of Symptoms (days) | 14 |
| Mean Duration of Symptoms (days) | 15 |
| Mode Duration of Symptoms (days) | 7 |
| Range Duration of Symptoms (days) | 4-32 |
| Median symptom start to donation (days) | 47 |
| Mean symptom start to donation (days) | 49 |
| Mode symptom start to donation (days) | 47 |
| Range symptom start to donation (days) | 38-64 |

Extended Data Table 3. MAbs generated from single
B cell heavy and light chain gene sequences.

| mAb ID | Specificity | Cluster | Isotype | # HC SHM | VH Gene | #LC SHM | Vk/L gene |
|---|---|---|---|---|---|---|---|
| S20-15 | Spike/RBD | 7 | IgG1 | 8 | VH 4-59 | 1 | VL 3-21 |
| S20-22 | NP | 9 | IgG1 | 7 | VH 4-4 | 4 | Vk 4-1 |
| S20-31 | NP | 7 | IgG4 | 30 | VH 1-24 | 22 | Vk 3-20 |
| S20-40 | NP | 2 | IgM | 0 | VH 4-4 | 1 | VL 2-14 |
| S20-58 | Spike/RBD | 4 | IgG1 | 5 | VH 4-30 | 2 | Vk 2-24 |
| S20-74 | Spike/RBD | 4 | IgG1 | 6 | VH 4-59 | 3 | VL 2-8 |
| S20-86 | Spike | 7 | IgG1 | 9 | VH 3-9 | 2 | VL 2-14 |
| S24-68 | ORF8 | 7 | IgG1 | 4 | VH 4-59 | 3 | VL 1-44 |
| S24-105 | ORF8 | 7 | IgG1 | 6 | VH 3-48 | 4 | Vk 3-20 |
| S24-178 | NP | 4 | IgG1 | 2 | VH 3-33 | 7 | VL 2-14 |
| S24-188 | NP | 7 | IgG3 | 2 | VH 1-69 | 3 | VL 2-14 |
| S24-202 | NP | 4 | IgG1 | 3 | VH 5-10 | 6 | Vk 3-11 |
| S24-278 | ORF8 | 7 | IgG1 | 3 | VH 1-2 | 1 | Vk 3-20 |
| S24-339 | Spike/RBD | 4 | Unknown | 5 | VH 3-49 | 1 | Vk 3-15 |
| S24-472 | ORF8 | 7 | IgG1 | 5 | VH 4-4 | 4 | VL 4-16 |
| S24-490 | ORF8 | 4 | IgM | 2 | VH 1-46 | 4 | Vk 3-20 |
| S24-494 | Spike/RBD | 6 | IgG3 | 0 | VH 4-39 | 0 | Vk 1-39 |
| S24-566 | ORF8 | 4 | IgG1 | 3 | VH 3-49 | 1 | Vk 2-28 |
| S24-636 | ORF8 | 1 | IgD | 1 | VH 3-7 | 4 | VL 8-61 |
| S24-740 | ORF8 | 7 | IgG1 | 5 | VH 1-3 | 1 | Vk 4-1 |
| S24-791 | NP | 7 | IgG1 | 4 | VH 4-59 | 6 | Vk 3-20 |
| S24-902 | Spike/RBD | 5 | IgG1 | 0 | VH 1-69 | 0 | VL 7-46 |
| S24-921 | NP | 7 | IgG1 | 8 | VH 4-59 | 7 | Vk 1-39 |
| S24-1063 | NP | 4 | IgG1 | 3 | VH 4-59 | 1 | Vk 3-20 |
| S24-1224 | Spike/RBD | 4 | IgG1 | 7 | VH 1-46 | 7 | VL 1-40 |
| S24-1271 | Spike/RBD | 7 | IgM | 6 | VH 3-66 | 6 | VL 3-1 |
| S24-1339 | Spike/RBD | 4 | IgG1 | 1 | VH 3-53 | 1 | Vk 3-20 |
| S24-1345 | ORF8 | 1 | IgD | 0 | VH 4-39 | 0 | Vk 1-13 |
| S24-1378 | ORF8 | 1 | IgM | 0 | VH 3-53 | 0 | VL 8-61 |
| S24-1379 | NP | 1 | IgG1 | 0 | VH 4-59 | 0 | VL 1-47 |
| S24-1384 | Spike/RBD | 7 | IgG1 | 2 | VH 3-48 | 4 | VL 3-21 |
| S24-1476 | Spike/RBD | 4 | IgG | 2 | VH 3-49 | 0 | Vk 3-15 |
| S24-1564 | NP | 4 | IgG1 | 10 | VH 4-59 | 4 | Vk 1-39 |
| S24-1636 | NP | 4 | IgG1 | 3 | VH 3-33 | 0 | Vk 3-11 |
| S24-1002 | Spike/RBD | 7 | IgM | 3 | VH 3-30 | 5 | Vk 1-13 |
| S24-1301 | Spike | 7 | IgG1 | 4 | VH 1-24 | 4 | VL 10-54 |
| S24-223 | Spike/RBD | 4 | IgM | 1 | VH 2-5 | 3 | VL 2-14 |
| S24-461 | Spike/RBD | 4 | IgG1 | 7 | VH 4-59 | 3 | VL 3-16 |
| S24-511 | NP | 5 | IgD | 0 | VH 3-30 | 0 | VL 3-1 |
| S24-788 | Spike/RBD | 5 | IgM | 0 | VH 3-33 | 1 | VL 3-1 |
| S24-821 | Spike/RBD | 4 | IgM | 4 | VH2-70 | 0 | Vk 1-5 |
| S144-67 | Spike/RBD | 7 | IgG1 | 7 | VH 5-51 | 5 | VL 1-40 |
| S144-69 | Spike/RBD | 4 | IgG1 | 2 | VH 5-51 | 3 | Vk 1-5 |
| S144-94 | ORF8 | 7 | IgG3 | 11 | VH 3-30 | 0 | Vk 2-28 |
| S144-113 | ORF8 | 7 | IgG1 | 9 | VH 3-23 | 6 | Vk 1-39 |
| S144-175 | ORF8 | 7 | IgG1 | 9 | VH 1-2 | 1 | VL 1-47 |
| S144-208 | ORF8 | 4 | IgG1 | 6 | VH 1-2 | 7 | VL 2-11 |
| S144-339 | NP | 4 | IgG1 | 11 | VH 3-21 | 7 | VK 3-20 |
| S144-359 | ORF8 | 4 | IgG3 | 5 | VH 3-23 | 5 | Vk 1-39 |
| S144-460 | Spike/RBD | 3 | IgA1 | 34 | VH 3-15 | 24 | Vk1D-17 |
| S144-466 | Spike/RBD | 7 | IgG3 | 6 | VH 5-51 | 6 | Vk 1-5 |
| S144-469 | ORF8 | 4 | IgG1 | 3 | VH 4-59 | 2 | Vk 2-28 |
| S144-509 | Spike/RBD | 7 | IgG1 | 3 | VH 5-51 | 1 | Vk 1-5 |
| S144-516 | ORF8 | 7 | IgG1 | 5 | VH 1-2 | 7 | VL 1-40 |
| S144-568 | Spike/RBD | 6 | IgA2 | 11 | VH 4-59 | 11 | Vk 3-20 |
| S144-576 | Spike/RBD | 4 | IgG1 | 3 | VH 1-69 | 2 | Vk 1-5 |
| S144-588 | ORF8 | 7 | IgG1 | 1 | VH 4-39 | 3 | VL 3-1 |
| S144-628 | Spike/RBD | 5 | IgA1 | 9 | VH 5-51 | 10 | VL 1-40 |
| S144-740 | ORF8 | 7 | IgG1 | 1 | VH 1-2 | 5 | Vk 3-20 |
| S144-741 | ORF8 | 4 | IgG1 | 5 | VH 1-2 | 1 | VL 1-44 |
| S144-803 | Spike/RBD | 4 | IgG1 | 5 | VH 5-51 | 3 | Vk 1-5 |
| S144-843 | ORF8 | 5 | Unknown | 20 | VH 3-30 | 8 | Vk 3-20 |
| S144-877 | Spike/RBD | 7 | IgG1 | 2 | VH 3-30 | 6 | Vk 1-33 |
| S144-952 | NP | 4 | IgM | 4 | VH 1-18 | 2 | Vk 4-1 |
| S144-971 | ORF8 | 7 | IgG1 | 6 | VH 3-64 | 3 | Vk 4-1 |
| S144-1036 | NP | 7 | IgG1 | 2 | VH 4-34 | 5 | Vk 4-1 |
| S144-1079 | Spike/RBD | 7 | IgG1 | 7 | VH 1-69 | 3 | Vk 3-20 |
| S144-1299 | ORF8 | 4 | IgG1 | 5 | VH 4-59 | 0 | VL 1-47 |
| S144-1339 | Spike/RBD | 4 | IgG1 | 12 | VH 1-2 | 5 | VL 2-14 |
| S144-1406 | Spike/RBD | 7 | IgG2 | 3 | VH 1-3 | 0 | Vk 1-5 |
| S144-1407 | Spike/RBD | 4 | IgG1 | 6 | VH 1-69 | 2 | Vk 1-5 |
| S144-1569 | ORF8 | 7 | IgG1 | 7 | VH 1-18 | 1 | VL 9-49 |
| S144-1641 | Spike/RBD | 7 | IgG1 | 4 | VH 5-51 | 9 | Vk 1-5 |
| S144-1827 | Spike/RBD | 3 | IgM | 20 | VH 3-7 | 5 | Vk 3-20 |
| S144-1848 | NP | 7 | IgG1 | 4 | VH 3-21 | 8 | VL 1-47 |
| S144-1850 | Spike/RBD | 7 | IgG1 | 2 | VH 3-23 | 3 | Vk 1-5 |
| S144-2234 | ORF8 | 4 | IgG1 | 4 | VH 1-69 | 3 | Vk 4-1 |
| S564-105 | NP | 4 | IgG1 | 5 | VH 4-61 | 2 | VL 2-14 |
| S564-14 | Spike/RBD | 4 | IgD | 3 | VH 3-7 | 0 | Vk 3-21 |
| S564-68 | Spike/RBD | 7 | IgG1 | 6 | VH 1-2 | 2 | VL 2-8 |
| S564-98 | NP | 7 | IgG3 | 0 | VH 4-59 | 3 | Vk 1-39 |
| S564-105 | NP | 4 | IgG1 | 5 | VH 4-61 | 2 | VL 2-14 |
| S564-134 | Spike/RBD | 7 | IgG1 | 2 | VH 1-2 | 6 | VL 2-8 |
| S564-138 | Spike/RBD | 4 | IgG1 | 8 | VH 1-2 | 1 | VL 2-14 |
| S564-152 | Spike/RBD | 7 | IgG1 | 4 | VH 3-33 | 4 | Vk 1-33 |
| S564-218 | Spike/RBD | 5 | IgM | 1 | VH 1-69 | 0 | VL 2-8 |
| S564-249 | NP | 4 | IgA1 | 19 | VH 3-64 | 19 | VL 2-14 |
| S564-265 | Spike/RBD | 7 | IgG1 | 4 | VH 1-2 | 3 | VL 2-8 |
| S564-275 | NP | 4 | IgM | 3 | VH 4-59 | 6 | Vk 1-39 |
| S564-287 | ORF8 | 4 | IgM | 1 | VH 1-2 | 3 | VL2-14 |

### E. References

[0468] The following references, to the extent that they provide exemplary procedural or other details supplementary to those set forth herein, are specifically incorporated herein by reference.
[0469] 1 Chen, X. et al. Human monoclonal antibodies block the binding of SARS-CoV-2 spike protein to angiotensin converting enzyme 2 receptor. Cell Mol Immunol 17, 647-649, doi:10.1038/s41423-020-0426-7 (2020).
[0470] 2 Wang, C. et al. A human monoclonal antibody blocking SARS-CoV-2 infection. Nat Commun 11, 2251, doi:10.1038/s41467-020-16256-y (2020).
[0471] 3 Yi, C. et al. Key residues of the receptor binding motif in the spike protein of SARS-CoV-2 that interact with ACE2 and neutralizing antibodies. Cell Mol Immunol 17, 621-630, doi:10.1038/s41423-020-0458-z (2020).
[0472] 4 Lan, J. et al. Structure of the SARS-CoV-2 spike receptor-binding domain bound to the ACE2 receptor. Nature 581, 215-220, doi:10.1038/s41586-020-2180-5 (2020).
[0473] 5 Yan, R. et al. Structural basis for the recognition of SARS-CoV-2 by full-length human ACE2. Science 367, 1444-1448, doi:10.1126/science.abb2762 (2020).
[0474] 6 Robbiani, D. F. et al. Convergent antibody responses to SARS-CoV-2 in convalescent individuals. Nature 584, 437-442, doi:10.1038/s41586-020-2456-9 (2020).
[0475] 7 Wee, A. Z. et al. Broad neutralization of SARS-related viruses by human monoclonal antibodies. Science 369, 731-736, doi:10.1126/science.abc7424 (2020).
[0476] 8 Kopecky-Bromberg, S. A., Martinez-Sobrido, L., Frieman, M., Baric, R. A. & Palese, P. Severe acute respiratory syndrome coronavirus open reading frame (ORF) 3b, ORF 6, and nucleocapsid proteins function as interferon antagonists. J Virol 81, 548-557, doi:10.1128/JVI.01782-06 (2007).
[0477] 9 Lu, X., Pan, J., Tao, J. & Guo, D. SARS-CoV nucleocapsid protein antagonizes IFN-beta response by targeting initial step of IFN-beta induction pathway, and its C-terminal region is critical for the antagonism. Virus Genes 42, 37-45, doi:10.1007/s11262-010-0544-x (2011).
[0478] 10 Grifoni, A. et al. Targets of T Cell Responses to SARS-CoV-2 Coronavirus in Humans with COVID-19 Disease and Unexposed Individuals. Cell 181, 1489-1501 e1415, doi:10.1016/j.cell.2020.05.015 (2020).
[0479] 11 Ni, L. et al. Detection of SARS-CoV-2-Specific Humoral and Cellular Immunity in COVID-19 Convalescent Individuals. Immunity 52, 971-977 e973, doi:10.1016/j.immuni.2020.04.023 (2020).
[0480] 12 Li, J. Y. et al. The ORF6, ORF8 and nucleocapsid proteins of SARS-CoV-2 inhibit type I interferon signaling pathway. Virus Res 286, 198074, doi:10.1016/j.virusres.2020.198074 (2020).
[0481] 13 Atyeo, C. et al. Distinct Early Serological Signatures Track with SARS-CoV-2 Survival. Immunity 53, 524-532 e524, doi:10.1016/j.immuni.2020.07.020 (2020).
[0482] 14 Guthmiller, J. J. et al. SARS-CoV-2 infection severity is linked to superior humoral immunity against the spike. bioRxiv, doi:10.1101/2020.09.12.294066 (2020).
[0483] 15 Brouwer, P. J. M. et al. Potent neutralizing antibodies from COVID-19 patients define multiple targets of vulnerability. Science, doi:10.1126/science.abc5902 (2020).
[0484] 16 Cao, Y. et al. Potent Neutralizing Antibodies against SARS-CoV-2 Identified by High-Throughput Single-Cell Sequencing of Convalescent Patients' B Cells. Cell 182, 73-84 e16, doi:10.1016/j.cell.2020.05.025 (2020).
[0485] 17 Hansen, J. et al. Studies in humanized mice and convalescent humans yield a SARS-CoV-2 antibody cocktail. Science, doi:10.1126/science.abd0827 (2020).
[0486] 18 Zhang, X. Regulatory functions of innate-like B cells. Cell Mol Immunol 10, 113-121, doi:10.1038/cmi.2012.63 (2013).
[0487] 19 Palm, A. E. & Henry, C. Remembrance of Things Past: Long-Term B Cell Memory After Infection and Vaccination. Front Immunol 10, 1787, doi:10.3389/fimmu.2019.01787 (2019).
[0488] 20 Laidlaw, B. J., Duan, L., Xu, Y., Vazquez, S. E. & Cyster, J. G. The transcription factor Hhex cooperates with the corepressor Tle3 to promote memory B cell development. Nat Immunol 21, 1082-1093, doi:10.1038/s41590-020-0713-6 (2020).
[0489] 21 Lightman, S. M., Utley, A. & Lee, K. P. Survival of Long-Lived Plasma Cells (LLPC): Piecing Together the Puzzle. Front Immunol 10, 965, doi:10.3389/fimmu.2019.00965 (2019).
[0490] 22 Brynjolfsson, S. F. et al. Long-Lived Plasma Cells in Mice and Men. Front Immunol 9, 2673, doi:10.3389/fimmu.2018.02673 (2018).
[0491] 23 Atyeo, C. et al. Distinct Early Serological Signatures Track with SARS-CoV-2 Survival. Immunity, doi: 10.1016/j.immuni 0.2020.07.020 (2020).
[0492] 24 Garimalla, S. et al. Differential transcriptome and development of human peripheral plasma cell subsets. JCI Insight 4, doi:10.1172/jci.insight.126732 (2019).
[0493] 25 Lau, D. et al. Low CD21 expression defines a population of recent germinal center graduates primed for plasma cell differentiation. Sci Immunol 2, doi:10.1126/sciimmunol.aai8153 (2017).
[0494] 26 Kaneko, N. et al. Loss of Bcl-6-Expressing T Follicular Helper Cells and Germinal Centers in COVID-19. Cell, doi:10.1016/j.cell.2020.08.025 (2020).
[0495] 27 Dugan, H. L., Henry, C. & Wilson, P. C. Aging and influenza vaccine-induced immunity. Cell Immunol 348, 103998, doi:10.1016/j.cellimm.2019.103998 (2020).
[0496] 28 Henry, C. et al. Influenza Virus Vaccination Elicits Poorly Adapted B Cell Responses in Elderly Individuals. Cell Host Microbe 25, 357-366 e356, doi: 10.1016/j.chom.2019.01.002 (2019).
[0497] 29 Le Bert, N. et al. SARS-CoV-2-specific T cell immunity in cases of COVID-19 and SARS, and uninfected controls. Nature 584, 457-462, doi:10.1038/s41586-020-2550-z (2020).
[0498] 30 Peng, Y. et al. Broad and strong memory CD4(+) and CD8(+) T cells induced by SARS-CoV-2 in UK convalescent individuals following COVID-19. Nat Immunol, doi:10.1038/s41590-020-0782-6 (2020).
[0499] 31 Amanat, F. et al. A serological assay to detect SARS-CoV-2 seroconversion in humans. medRxiv, doi:10.1101/2020.03.17.20037713 (2020).
[0500] 32 Stadlbauer, D. et al. SARS-CoV-2 Seroconversion in Humans: A Detailed Protocol for a Serological Assay, Antigen Production, and Test Setup. Curr Protoc Microbiol 57, el00, doi:10.1002/cpmc.100 (2020).
[0501] 33 Nelson, C. A., Pekosz, A., Lee, C. A., Diamond, M. S. & Fremont, D. H. Structure and intracellular targeting of the SARS-coronavirus Orf7a accessory protein. Structure 13, 75-85, doi:10.1016/j.str.2004.10.010 (2005).
[0502] 34 Nelson, C. A., Lee, C. A. & Fremont, D. H. Oxidative refolding from inclusion bodies. Methods Mol Biol 1140, 145-157, doi:10.1007/978-1-4939-0354-2_11 (2014).
[0503] 35 Cao, J. et al. The single-cell transcriptional landscape of mammalian organogenesis. Nature 566, 496-502, doi:10.1038/s41586-019-0969-x (2019).
[0504] 36 Qiu, X. et al. Reversed graph embedding resolves complex single-cell trajectories. Nat Methods 14, 979-982, doi:10.1038/nmeth.4402 (2017).
[0505] 37 Stuart, T. et al. Comprehensive Integration of Single-Cell Data. Cell 177, 1888-1902 e1821, doi:10.1016/j.ce11.2019.05.031 (2019).
[0506] 38 Guthmiller, J. J., Dugan, H. L., Neu, K. E., Lan, L. Y. & Wilson, P. C. An Efficient Method to Generate Monoclonal Antibodies from Human B Cells. Methods Mol Biol 1904, 109-145, doi:10.1007/978-1-4939-8958-4_5 (2019).
[0507] 39 Andrews, S. F. et al. Immune history profoundly affects broadly protective B cell responses to influenza. Sci Transl Med 7, 316ra192, doi:10.1126/scitranslmed.aad0522 (2015).
[0508] 40 Bunker, J. J. et al. Natural polyreactive IgA antibodies coat the intestinal microbiota. Science 358, doi:10.1126/science.aan6619 (2017).
[0509] 41 Shlomchik, M. J., Aucoin, A. H., Pisetsky, D. S. & Weigert, M. G. Structure and function of anti-DNA autoantibodies derived from a single autoimmune mouse. Proc Natl Acad Sci USA 84, 9150-9154, doi:10.1073/pnas.84.24.9150 (1987).
[0510] 42 Rydyznski Moderbacher, C. et al. Antigen-specific adaptive immunity to SARS-CoV-2 in acute COVID-19 and associations with age and disease severity. Cell doi:10.1016/j.ce11.2020.09.038 (2020).

### Example 2: Profiling B Cell Immunodominance after SARS-CoV-2 Infection Reveals Antibody Evolution to Non-Neutralizing Viral Targets

[0511] Dissecting the evolution of memory B cells (MBCs) against SARS-CoV-2 is critical for understanding antibody recall upon secondary exposure. Here, the inventors used single-cell sequencing to profile SARS-CoV-2-reactive B cells in 38 COVID-19 patients. Using oligo-tagged antigen baits, the inventors isolated B cells specific to the SARS-CoV-2 spike, nucleoprotein (NP), open reading frame 8 (ORFS), and endemic human coronavirus (HCoV) spike proteins. SARS-CoV-2 spike-specific cells were enriched in the memory compartment of acutely infected and convales-cent patients several months post symptom onset. With severe acute infection, substantial populations of endemic HCoV-reactive antibody-secreting cells were identified and possessed highly mutated variable genes, signifying preexisting immunity. Finally, MBCs exhibited pronounced maturation to NP and ORF8 overtime, especially in older patients. Monoclonal antibodies against these targets were non-neutralizing and non-protective in vivo. These findings reveal antibody adaptation to non-neutralizing intracellular antigens during infection, emphasizing the importance of vaccination for inducing neutralizing spike-specific MBCs.

[0512] Since the emergence of SARS-CoV-2 in December 2019, the World Health Organization has reported more than 160 million infections and 3 million deaths worldwide, with these statistics continuing to rise (World Health Organization, 2021). Faced with such persistence, the prospect of reinfection or infection with newly emerging variants warrants studies evaluating the generation of durable B cell memory upon infection.

[0513] Early in the pandemic, several independent groups identified that potently neutralizing antibodies are induced against the SARS-CoV-2 spike protein, the major antigenic glycoprotein of the virus (Chen et al., 2020; Lan et al., 2020; Robbiani et al., 2020; Wang et al., 2020; Yan et al., 2020; Yi et al., 2020). Since then, there has been a dedicated interest in the identification of durable memory B cells (MBCs) that provide protection from re-infection. The inventors' group and others have identified MBCs against the spike, nucleoprotein (NP), and open reading frame 8 (ORF8) proteins in convalescence, and some studies show that these populations persist several months after infection (Dan et al., 2021; Guthmiller et al., 2021; Hartley et al., 2020; Rodda et al., 2021). Beyond their longevity, spike-specific MBCs continue to adapt to SARS-CoV-2 up to 6 months post-infection, in a manner consistent with antigen persistence and ongoing germinal centers (GCs) (Gaebler et al., 2021; Sakharkar et al., 2021; Sokal et al., 2021).

[0514] Despite these advances, there is a lack of a clear understanding of MBC immunodominance and adaptation to distinct SARS-CoV-2 antigens over time and how this correlates with factors such as patient age and disease severity. Moreover, it remains to be determined whether MBCs to internal viral protein targets such as NP and ORF8 can provide protection from infection. Finally, the role of preexisting immunity to endemic human coronaviruses (HCoV) in shaping MBC responses to SARS-CoV-2 is poorly understood.

[0515] To address these knowledge gaps, the inventors characterized the SARS-CoV-2-specific B cell repertoire in 38 COVID-19 patients, both severe acute and convalescent, approximately 1.5-4.5 months post-symptom onset, using oligo-tagged antigen bait sorting and single-cell RNA sequencing (RNA-seq). Through this approach, the inventors provide a tool for evaluating human B cell subsets, immunodominance, and antibody adaptation to SARS-CoV-2 and have made a repository of more than 13,000 antibody sequences available to the SARS-CoV-2 research community.

[0516] These studies reveal that MBCs display substantial reactivity toward NP and ORF8 and continue to expand and adapt to these targets over time, particularly in older patients. Although SARS-CoV-2 receptor binding domain (RBD)-specific monoclonal antibodies (mAbs) were potently neutralizing and protective, the inventors showed that anti-NP and anti-ORF8 mAbs failed to neutralize and provide protection in vivo. Thus, preexisting MBC bias to non-neutralizing targets in SARS-CoV-2 could affect susceptibility to or severity of re-infection. Together, these findings highlight the importance of current SARS-CoV-2 vaccines, which are optimally formulated to induce protective MBC responses against the spike protein of SARS-CoV-2.

[0517] A. Results

[0518] Single-cell RNA-seq reveals substantial complexity among endemic HCoV- and SARS-CoV-2-specific B cells MBCs have potential to act as an early line of defense against viral infection, as they rapidly expand into antibody-secreting cells (ASCs) upon antigen re-encounter. To determine the landscape of MBC reactivity toward distinct SARS-CoV-2 and endemic HCoV spike viral targets, the inventors collected peripheral blood mononuclear cells (PBMCs) and serum between April and May 2020 from 10 severely infected acute subjects and 28 subjects upon recovery from SARS-CoV-2 viral infection (Tables S1-S4). In addition, 4 convalescent subjects returned approximately 4.5 months post-symptom onset for a second blood draw, with similar volumes of whole blood processed across time points. Severe acute infected samples were collected days 0, 1, 3, 5, and 14 before (day 0) and after receiving convalescent plasma therapy (Tables S3 and S4). All sampling time points were pooled from the same subjects for analysis because of small cell numbers.

[0519] To identify SARS-CoV-2-specific B cells, the inventors used the SARS-CoV-2 (SARS2) spike protein, spike RBD, NP, and ORF8 to generate probes for bait-sorting enriched B cells for subsequent single-cell RNA-seq analysis. This was done by conjugating distinct PE-streptavidin (SA)-oligos (BioLegend Total Seq) to individual biotinylated antigens (FIG. 10a). To control for non-specific B cell reactivity and B cells reactive to PE, and thus improve the specificity of sorting and downstream analysis, the inventors included an empty PE-SA-oligo, along with hantavirus PUUV, an irrelevant viral antigen control, on APC. Finally, to understand the impacts of preexisting immunity to endemic HCoV spike proteins, which share up to 30% amino acid identity with the SARS2 spike, the inventors included a cocktail of spike proteins from four coronavirus strains that cause mild upper respiratory infections in the vast majority of individuals: HCoV-229E, HCoV-NL63, HCoV-HKUL and HCoV-OC43, on one additional APC-SA-oligo.

[0520] From a total of 38 subjects analyzed (including four matched follow-up visits ˜4.5 months post-symptom onset), the inventors detected small percentages (0.02%-1.25%) of SARS-CoV-2-reactive total CD19⁺ B cells, which were subsequently used to prepare 5° transcriptome, immunoglobulin (Ig) VDJ, and antigen-specific probe feature libraries for sequencing (FIG. 10a). The inventors sorted on total CD19+ B cells with elevated mean fluorescence intensity in order to capture highly specific cells regardless of naive-like or MBC origin, though a caveat of this approach may be the exclucion of lower affinity B cells. The inventors then integrated sequencing results from all 38 subjects using Seurat to remove batch effects and identified 16 transcriptionally distinct B cell clusters on the basis of expression profiles (FIG. 10b). Adopting the ROGUE scoring method, which compares how similar all transcriptomes within a cluster are to one another, the inventors determined that most clusters were highly pure, with the majority having a score over 0.9 (1.0 indicating 100% purity) (FIG. 10c; Liu et al., 2020). The inventors ensured that the feature libraries correlated with single-probe antigen-specific reactivity using a series of filtering steps to remove cells that were probe negative, multi-reactive and non-specific, empty PE-SA⁺, or Hanta-PUUV⁺. Because of the nature of this approach and the inability to clone antibodies from every B cell, it remains likely that a fraction of cells included in the analysis are non-specific and that a fraction of cells excluded either by gating or pre-filtering were actually specific. Therefore, the dataset represents only a subset of the total antigen-specific B cells induced by SARS-CoV-2. After all pre-filtering steps were complete, mapping only the cells that bound a single probe revealed that antigen-specific cells were enriched in distinct transcriptional clusters (FIGS. 10d-e), with considerable variation observed among individual subjects (FIGS. 16a-b). The inventors did not identify obvious differences in B cell subset distribution or antigen reactivity in B cells from severe acute subjects analyzed early (days 0, 1, and 3) or late (days 7 and 14 post-convalescent plasma therapy (FIGS. 16c-d). In summary, this method revealed substantial complexity in the B cell response to distinct coronavirus antigens, which the inventors then further dissected by subset.

[0521] 1. The SARS-CoV-2-Specific B Cell Landscape is Defined by Naive-Like and MBC Subsets

[0522] To discern the identity and specificity of each B cell cluster, the inventors analyzed Ig repertoire, variable heavy (VH) chain somatic hypermutation (SHM) rates, and differentially expressed genes. Different B cell clusters varied widely in their degree of class-switch recombination (CSR) and SHM, consistent with the presence of both naive-like and memory-like B cell subsets (FIG. 11a). Moreover, the inventors quantitatively identified that targeting of viral antigens was variable across clusters (FIG. 11a). To confirm B cell subset identities, the inventors curated lists of differentially expressed genes across clusters associated with naive B cells, MBCs, recent GC emigrant cells, ASCs, and innate-like B cells (including B1 B cells and marginal zone B cells) (FIG. 11b). Clusters 0, 1, 3, and 5 expressed Ig genes with little to no SHM or CSR and gene signatures associated with naive B cells, suggesting that these subsets were composed of naive-like B cells or very recently activated B cells (FIGS. 11a-b). In addition, clusters with patterns of higher CSR and SHM were further investigated for memory gene signatures. On the basis of expression of key genes (Tables S5 and S6) the inventors identified clusters 4, 6, 7, and 8 as MBCs; clusters 2, 9, and 13 as recent memory or GC emigrants; clusters 10, 11, and 15 as ASCs; and clusters 12 and 14 as innate-like in nature, though genes for these subsets are not well defined in humans (Figs a-b, bottom).

[0523] The inventors generated scores for each cluster and projected them onto UMAP, allowing us to visualize how closely associated clusters relate to one another on the basis of their B cell subset score (FIG. 11c). The inventors further visualized how cells clustered on the basis of identity by overlaying key gene signatures for MBCs, recent GC emigrants, and ASCs (Table S6). Some cells were outside of their home cluster, suggesting that they were in the course of differentiation and highlighting the plasticity of cells in an active immune response (FIGS. 17a-c). ASC clusters 10, 11, and 15 displayed a high degree of SHM, suggesting that they may derive from preexisting memory that was driven against endemic HCoV spike proteins (FIG. 11a). These clusters were also predominantly class-switched to IgA, an isotype most associated with mucosal immunity. To explore this possibility, the inventors mapped the expression of genes related to mucosal surface homing and found them to be highly expressed in ASC clusters, implying that memory to past HCoV infection generates a large plasmablast response during SARS-CoV-2 infection that re-circulates in the blood and should localize to mucosal surfaces (FIG. 17d). In conclusion, the inventors confirm that the landscape of B cell reactivity to SARS-CoV-2 and HCoV antigens is defined by distinct naive-like and MBC sub sets.

[0524] 2. B Cell Immunodominance and Adaptability to SARS-CoV-2 and HCoVs Changes with Time after Infection

[0525] The kinetics and evolution of B cells against the spike and non-spike antigens are poorly understood. The inventors next investigated the dynamics of B cell subsets and their antigenic targets over time in severe acute subjects and convalescent subjects representing a range of disease severity. By color-coding cells belonging to the severe acute cohort (red), convalescent visit 1 (˜1.5 months post-symptom onset; blue), and convalescent visit 2 (˜4.5 months post-symptom onset; yellow) in the integrated UMAP, it became evident that distinct B cell subsets were enriched in different time points and cohorts. ASC clusters 10, 11, and 15 were derived predominantly from severe acute subjects (FIG. 12a). The two convalescent time points were composed largely of naive-like and MBC clusters, with convalescent visit 2 being the most enriched for canonical class-switched MBCs (clusters 4 and 7) (FIG. 12a). The severe acute cohort exhibited minimal targeting of the SARS2 spike protein and instead targeted HCoV spike and ORF8 (FIGS. 12b-c). As these ASCs were activated by SARS-CoV-2, it appeared that these were boosted MBCs with higher affinity for HCoV spikes and therefore displayed B cell receptors (BCRs) predominately loaded with HCoV spike probe when stained. In contrast, convalescent visit 1 was most enriched for SARS2 spike binding, which subsequently declined in percentage in convalescent visit 2, in which the frequency of B cells to NP and ORF8 was increased (FIGS. 12b-c).

[0526] The dynamic change observed in antigen targeting over time led us to examine antigen reactivity within distinct B cell subsets for each cohort. For the severe acute cohort, B cells binding intracellular proteins were dominated by ASC clusters, whereas SARS2 spike-specific B cells were enriched in early memory and GC emigrant B cell clusters (FIG. 12d). As previously noted, HCoV spike-specific B cells were enriched in ASCs of the severe acute cohort, indicative of re-activation of preexisting immune memory. Consistent with this, HCoV spike-specific B cells were highly mutated in the acute cohort compared with SARS2 spike-, NP-, and ORF8-specific B cells (FIG. 18a).

[0527] Across the two convalescent visits, B cells reactive to ORF8 and NP were increased in percentage and absolute numbers relative to spike B cells (FIGS. 12e-g; total cell numbers indicated). Although the degree of SHM for all antigen-specific B cells was increased across study visits (FIG. 18h; FIGS. 18b-c), the B cells displaying the highest degree of SHM in convalescent visit 2 were majority NP-specific (FIGS. 12i-j). At the individual level, all four subjects displayed increases in the percentage of MBCs to NP across time points, and half of the subjects displayed modest increases to ORF8. The change in percentage for spike-specific B cells across visits was negligible for three of four subjects, with one subject displaying a substantial decrease (FIG. 18d, S210). Previous groups have identified that spike-specific MBCs increase over time (Dan et al., 2021; Rodda et al., 2021; Sokal et al., 2021), and the study is limited in that this analysis was performed in only four subjects. However, this data support the claim that there is MBC maturation to NP and, to a lesser extent, ORF8 over time.

[0528] Analyzing isotype frequencies by antigen specificity for each cohort revealed additional differences across time points. The majority of class-switched B cells were IgA in the severe acute cohort, regardless of antigen reactivity (FIG. 18e) In contrast, class switching to IgG1 was prominent for SARS2 spike-, NP-, and ORF8-reactive B cells in convalescent visit 1, while HCoV spike-reactive B cells remained largely IgA (FIG. 18f). Class-switched B cells specific to the SARS2 spike declined in conva visit 2, and IgG1 class-switched B cells to ORF8 and NP increased in proportion (FIG. 18g).

[0529] Finally, the inventors did not identify substantial differences in serum titer to distinct antigens across convalescent visit time points (FIGS. 18h-j). Similarly, reactivity patterns in serological titer and probe hit to distinct antigens in individual subjects did not appear to be correlated (FIGS. 19a-e). This may be related to differences in B cell affinity to three-dimensional probes in the bait-sorting assay versus ELISA or the fact that the cellular response is sampled at one snapshot in time (more than 1 month post-symptom onset), with serology reflective of antibody that has accumulated since initial infection.

[0530] Together, these results point to differences in B cell immunodominance and adaptability landscapes across severe acute and convalescent cohorts, independent of serum titer. For both the severe acute cohort and convalescent visit 1 time point, SARS2 spike-specific B cells were initially the most enriched cells in memory. However, NP- and ORF8-reactive MBCs increased in proportion and showed signs of adaptation over time.

[0531] 3. SARS-CoV-2-Specific B Cells Display Unique Repertoire Features and Protective Ability

[0532] The identification of B cells against distinct antigens is typically associated with stereotypical VH and variable light-chain kappa (VK) or variable light-chain lambda (VL) gene usages. Immunodominant and neutralizing spike and RBD epitopes are of particular interest, as they represent key targets for vaccine-induced responses. To investigate whether antigen-specific B cells displayed enriched variable gene usages, the inventors analyzed VH and VK/VL pairs for B cells targeting HCoV spike, non-RBD spike epitopes, and RBD-specific epitopes. A B cell was considered non-RBD spike-specific if it bound full-length spike probe and not RBD probe, and a cell that bound both RBD and full-length spike was considered to be RBD-specific. Using this approach, the inventors found that B cells against HCoV spike, non-SARS2 RBD spike epitopes, and the SARS2 RBD were enriched for VH1-69 gene usage (FIGS. 13a-c). VH1-69 is commonly used by broadly neutralizing antibodies against the hemagglutinin stalk domain of influenza viruses, as well as the gp120 co-receptor binding site of HIV-1, because of its ability to bind conserved hydrophobic regions of viral envelope glycoproteins (Chen et al., 2019). VH1-69 usage by B cells that cross-react to SARS-CoV-2 and HCoV has also been indicated (Wec et al., 2020). However, VH1-69 usage for B cells targeting HCoV spike and SARS2 spike non-RBD epitopes was predominantly enriched in convalescent visit 1 subjects and not convalescent visit 2, suggesting that the repertoire may continue to evolve months after infection (FIGS. 13a-b, right). However, several VH gene usages were enriched in both convalescent visits, regardless of antigen specificity. For SARS2 spike non-RBD-specific B cells, VH3-7 and VH1-24 were also commonly used, which the inventors confirmed by characterizing cloned mAbs from the cohort (FIG. 13b; Table S7). Although NP-specific B cells used similar variable gene usages as RBD-specific B cells (FIG. 13d), ORF8-specific B cells were enriched for VH1-2 and VH1-3 paired with VK3-20, and enrichment for these VH genes persisted across both convalescent time points (FIG. 13e). Finally, by analyzing the frequency of the top ten heavy and light chain gene pairings (total antigen-specific cells) shared across subjects for both convalescent time points, the inventors observed variability among individual subjects and time points (FIG. 13f).

[0533] To better understand antigen-specific BCRs and how antigenic reactivity relates to immune effectiveness, the inventors next investigated the binding, neutralization potency, and in vivo protective ability of mAbs cloned from select BCRs. To do so, the inventors expressed nearly 100 mAbs against the SARS2 spike, NP, and ORF8 from convalescent subjects, representing a multi tude of clusters (Table S7). Cells from which to clone antibodies were chosen at random and were not chosen on the basis of specific sequence features. However, the inventors note that the results described herein may be affected by sampling bias, as only a small subset of antigen-specific mAbs were cloned. The inventors confirmed that cells designated as specific bound with moderate to high affinity to their corresponding antigens (FIG. 14a), and cells identified as multi-reactive exhibited features of polyreactivity or bound to PE (FIG. 19f). The inventors next tested the antibodies for viral neutralization using SARS-CoV-2/UW-001/Human/2020/Wisconsin virus plaque assays, where lower plaque-forming units (PFU) per milliliter equates to increased neutrali zation. Whereas 82% of mAbs to the RBD were neutralizing, including 42% exhibiting complete inhibition, only 23% of mAbs to spike regions outside of the RBD were neutralizing, and these showed relatively low potency (FIG. 14b). NP- and ORF8-specific mAbs were entirely non-neutralizing (FIG. 14b). Using animal models of SARS-CoV-2 infection, the inventors confirmed that anti-RBD antibodies were therapeutically protective in vivo, preventing weight loss and reducing lung viral titers relative to PBS control and an irrelevant Ebola anti-GP133 mAb (FIGS. 14c-d).

[0534] Although mAbs to NP and ORF8 were non-neutralizing in vitro, they might still provide protection in vivo, potentially through Fc-mediated pathways if the proteins were exposed on the virus or cell surface at appreciable levels. However, neither ORF8-reactive mAbs nor NP-reactive mAbs conferred protection from weight loss or viral infection in the lung in vivo (FIGS. 14e-h). Altogether, this data suggest that although B cells may continue to expand and evolve to intracellular antigens upon SARS-CoV-2 infection, B cell responses against these targets may not provide substantial protection from re-infection.

[0535] 4. B Cell Immunodominance is Shaped by Age, Sex, and Disease Severity

[0536] Serum antibody titers to the spike and intracellular proteins are shown to correlate with age, sex, and SARS-CoV-2 severity (Atyeo et al., 2020; Guthmiller et al., 2021; Robbiani et al., 2020). The inventors therefore analyzed the distribution of B cell subsets and frequencies of B cells specific to the spike, NP, and ORF8 in convalescent subjects stratified by age, sex, and severity of disease. Disease severity was stratified into three categories: mild, moderate, and severe, on the basis of symptom duration and symptoms experienced (Table S1), as defined previously (Guthmiller et al., 2021).

[0537] The inventors found that reactivity of total B cells toward different antigens varied widely by subject, likely reflecting host-intrinsic differences (FIG. 15a). With age, the inventors identified a decrease in the generation of spike-specific B cells and an increase in ORF8 and NP-specific B cells (FIG. 15b). Similarly, the percentage of total spike-specific B cells was reduced in subjects with more severe disease, whereas ORF8-specific B cells were increased (FIG. 15c). Last, the inventors identified that women had increased percentages of ORF8-reactive cells, whereas men showed slightly greater percentages of NP-reactive cells (Fig. To address whether differences in B cell reactivity with age and severity were associated with naive-like or MBC subsets, the inventors analyzed reactivity by subset. The inventors observed a substantial decrease in spike-specific MBCs and an increase in NP- and ORFS-reactive MBCs with age, while naive-like B cell subsets were more evenly distributed in reactivity across age groups (FIG. 15e; FIG. 20a). The inventors identified a significant correlation with age and the percentage of ORF8-reactive MBCs in women, but noting men (FIG. 20b-c). In contrast, the generation of specific MBCs was not different between mild and severe cases, though naive-like subsets targeting ORF8 were increased across mild, moderate, and severe disease (FIG. 15f; FIG. 20d).

[0538] Although B cell memory to the spike was decreased in older patients, the overall median number of VH SHMs for antigen-specific MBCs was increased relative to younger patients (FIG. 15g). However, whereas the majority of MBCs harboring the most mutations targeted the SARS2 spike in younger age groups (FIGS. 15h-i), mutated MBCs against NP and ORF8 were proportionately increased relative to the spike in older patients (FIG. 15j). Finally, the inventors observed variability in the percentages of MBCs and naive-like B cells across subjects (FIG. 15k), with older patients, patients with severe disease, and female patients generating reduced percentages of MBCs (FIGS. 15l-n). These findings point to older patients' exhibiting poorly adapted MBC responses to the spike, instead exhibiting increased targeting and adaptation to intracellular antigens. These data are analogous to B cell responses to influenza virus vaccination in the elderly and may be attributed to the effects of immunosenescence impairing the ability to form new memory over time (Dugan et al., 2020b; Henry et al., 2019). Alternatively, these findings may reflect potential effects of preexisting immunity on the boosting of NP-specific cross-reactive MBCs.

[0539] In summary, this study highlights the diversity of B cell subsets expanded upon novel infection with SARS-CoV-2. Using this approach, the inventors identified that B cells against the spike, ORFS, and NP differ in their ability to neutralize and derive from functionally distinct and differentially adapted B cell subsets; that MBC output over time shifts from the spike to intracellular antigens; and that targeting of these antigens is affected by age, sex, and disease severity.

[0540] B. Discussion

[0541] The COVID-19 pandemic continues to pose one of the greatest public health and policy challenges in modern history, and robust data on long-term immunity are critically needed to evaluate future decisions regarding COVID-19 responses. This approach combined three powerful aspects of B cell biology to address human immunity to SARS-CoV-2: B cell transcriptome, Ig sequencing, and recombinant mAb characterization. The inventors show that antibodies targeting key protective spike epitopes are enriched within MBC populations, but over time the MBC pool continues to adapt toward non-protective intracellular antigens, which could be a molecular hallmark of waning B-cell-mediated protection. This is further evidence that widespread vaccination, which only elicits a response to the spike, may be critical to end the pandemic.

[0542] Through this study, the inventors revealed that the landscape of antigen targeting and B cell subsets varied widely across severe acute subjects and convalescent subjects between 1.5 and 4.5 months post-symptom onset. Severe acute patients mounted a large ASC response toward HCoV spike and ORFS, derived largely from IgA ASC populations. The expansion of highly mutated plasmablasts to HCoV spike in severe acute patients suggests that the early response to SARS-CoV-2 in some patients may be dominated by an original antigen sin response, as plasma-blasts are often re-activated from preexisting memory (Dugan et al., 2020a). It remains unclear whether such responses worsen the severity of disease or reflect an inability to adapt to novel SARS2 spike epitopes. Alternatively, whether HCoV spike binding B cells adapt to the SARS2 spike and can provide protection is of interest for the potential generation of a universal coronavirus vaccine. Further investigation into the protection afforded by cross-reactive antibodies is warranted, as previous studies have identified cross-reactive HCoV and SARS1 binding antibodies can neutralize SARS-CoV-2 (Ng et al., 2020; Wec et al., 2020). Vaccine-induced responses to the spike will also be shaped by preexisting immunity and should be investigated.

[0543] Although SARS2 spike-specific B cells from the convalescent cohort were enriched in memory, the inventors also identified MBCs and ASCs to HCoV spike, which waned 4.5 months after infection. This later time point coincided with an increase in overall numbers and percentage of ORF8- and NP-specific MBCs, which displayed a marked increase in SHIM. This phenotype was pronounced in older patients, who exhibited reduced MBC targeting of the spike. Patients who were older, were female, and had more severe disease showed increased B cell targeting of ORF8, and older patients tended to generate more memory to intracellular proteins over time. The inventors identified B cells targeting these intracellular proteins as exclusively non-neutralizing and non-protective. Mechanistically, these observations may be explained by reduced adaptability of B cells or increased reliance on CD4 T cell help for B cell activation, which have been observed in aged individuals upon viral infections and are dysregulated in aged patients (Dugan et al., 2020b; Henry et al., 2019) Furthermore, T cell responses to SARS-CoV-2 intracellular proteins are prevalent in convalescent COVID-19 patients (Grifoni et al., 2020; Le Bert et al., 2020; Peng et al., 2020). The shift in memory output during convalescence may also reflect the massive difference in pro tein availability, with each virion producing only dozens of spikes but thousands of intracellular proteins (Grifoni et al., 2020; Lu et al., 2021; Yao et al., 2020).

[0544] Finally, the identification of multiple distinct antigen-specific subsets of naive-like, innate-like B cells, MBCs, and ASCs illustrates the complexity of the B cell response to SARS-CoV-2, revealing an important feature of the immune response against any novel pathogen. More research is warranted to determine whether the expansion of particular antigen-specific B cell subsets directly affects susceptibility and disease severity and, conversely, whether age or disease severity shape memory formation. Addressing these questions will be critical for understanding the disease course, determining correlates of protection, and developing vaccines capable of protecting against SARS-CoV-2 and emerging variants.

[0545] C. Experimental Model and Subject Details

[0546] 1. Human Materials

[0547] All studies were performed with the approval of the University of Chicago institutional review board IRB20-0523 and University of Chicago, University of Wisconsin-Madison, and Washington University in St. Louis institutional biosafety committees. Informed consent was obtained after the research applications and possible consequences of the studies were disclosed to study subjects. This clinical trial was registered at ClinicalTrials.gov with identifier NCT04340050, and clinical information for patients included in the study is detailed in Tables S1-S3. Convalescent leukoreduction filter donors were 18 years of age or older, eligible to donate blood as per standard University of Chicago Medicine Blood Donation Center guidelines, had a documented COVID-19 polymerase chain reaction (PCR) positive test, and complete resolution of symptoms at least 28 days prior to donation. Severe acute infected blood donors were 18 years of age or older and blood was collected per standard University of Chicago Medical Center guidelines. Subjects had a documented COVID-19 polymerase chain reaction (PCR) positive test, were hospitalized, and had been scheduled to receive an infusion of convalescent donor plasma. Four blood draws were collected both before and after plasma infusion, at days 0, 1, 3, and 14. PBMCs were collected from leukoreduction filters or blood draws within 2 hours post-collection and, if applicable, flushed from the filters using sterile 1× Phosphate-Buffered Saline (PBS, GIBCO) supplemented with 0.2% Bovine Serum Albumin (BSA, Sigma). Lymphocytes were purified by Lymphoprep Ficoll gradient (Thermo Fisher) and contaminating red blood cells were lysed by ACK buffer (Thermo Fisher). Cells were frozen in Fetal Bovine Serum (FBS, GIBCO) with 10% Dimethyl sulfoxide (DMSO, Sigma) prior to downstream analysis. On the day of sorting, B cells were enriched using the human pan B cell EasySep™ enrichment kit (STEMCELL).

[0548] D. Method Details

[0549] 1. Recombinant Proteins and Probe Generation

[0550] SARS-CoV-2 and Hanta PUUV proteins were obtained from the Krammer laboratory at Mt. Sinai, the Joachimiak laboratory at Argonne, and the Fremont laboratory at Washington University. pCAGGS expression constructs for the spike protein, spike RBD, and hanta PUUV were obtained from the Krammer lab at Mt. Sinai and produced in house in Expi293F suspension cells (Thermo Fisher). Sequences for the spike and RBD proteins as well as details regarding their expression and purification have been previously described (Amanat et al., 2020; Stadlbauer et al., 2020). Proteins were biotinylated for 2 hours on ice using EZ-Link Sulfo-NHS-Biotin, No-Weigh Format (Thermo Fisher) according to the manufacturer's instructions, unless previously Avi-tagged and biotinylated (ORF8 protein, Fremont laboratory). Truncated cDNAs encoding the Ig-like domains of ORF8 were inserted into the bacterial expression vector pET-21(a) in frame with a biotin ligase recognition sequence at the c-terminus (GLNDIFEAQKIEWHE). Soluble recombinant proteins were produced as described previously (Nelson et al., 2005). In brief, inclusion body proteins were washed, denatured, reduced, and then renatured by rapid dilution following standard methods (Nelson et al., 2014). The refolding buffer consisted of 400 mM arginine, 100 mM Tris-HCl, 2 mM EDTA, 200 mM ABESF, 5 mM reduced glutathione, and 500 mM oxidized glutathione at a final pH of 8.3. After 24 hr, the soluble-refolded protein was collected over a 10 kDa ultrafiltration disc (EMD Millipore, PLGC07610) in a stirred cell concentrator and subjected to chromatography on a HiLoad 26/60 Superdex S75 column (GE Healthcare). Site specific biotinylation with BirA enzyme was done following the manufacture's protocol (Avidity) except that the reaction buffer consisted of 100 mM Tri s-HCl (pH7.5) 150 mM NaCl, with 5 mM MgCl2 in place of 0.5 M Bicine at pH 8.3. Unreacted biotin was removed by passage through a 7K MWCO desalting column (Zeba spin, Thermo Fisher). Full-length SARS-CoV-2 NP was cloned into pET21a with a hexahistidine tag and expressed using BL21(DE3)-RIL E. coli in Terrific Broth (bioWORLD) Following overnight induction at 25° C., cells were lysed in 20 mM Tris-HCl pH 8.5, 1 M NaCl, 5 mM b-mercaptopethanol, and 5 mM imidazole for nickel-affinity purification and size exclusion chromatography. Endemic HCoV spike proteins (HCoV-229E, HCoV-NL63, HCoV-HKU1, and HCoV-OC43) were purchased from Sino Biological. Biotinylated proteins were then conjugated to Biolegend TotalSeq PE streptavidin (PE-SA), APC streptavidin (APC-SA), or non-fluorescent streptavidin (NF-SA) oligos at a molar ratio of antigen to PE-SA, APC-SA, or NF-SA. The amount of antigen was chosen based on a fixed amount of 0.5 mg PE-SA, APC-SA, or NF-SA and diluted in a final volume of 10 mL. PE-SA, APC-SA, or NF-SA was then added gradually to 10 mL biotinylated proteins times on ice, 1 mL PE-SA, APC-SA, or NF-SA (0.1 mg/ml stock) every 20 minutes for a total of 5 mL (0.5 mg) PE-SA, APC-SA, or NF-SA. The reaction was then quenched with 5 mL 4 mM Pierce biotin (Thermo Fisher) for 30 minutes for a total probe volume of 20 mL. Probes were then used immediately for staining.

[0551] 2. Antigen-Specific B Cell Sorting

[0552] PBMCs were thawed and B cells were enriched using EasySep™ pan B cell magnetic enrichment kit (STEMCELL). B cells were stained with a panel containing CD19 PE-Cy7 (Biolegend), IgM APC (Southern Biotech), CD27 BV605 (Biolegend), CD38 BB515 (BD Biosciences), and CD3 BV510 (BD Biosciences). B cells were stained with surface stain master mix and each COVID-19 antigen probe for 30 minutes on ice in 1×PBS supplemented with 0.2% BSA and 2 mM Pierce Biotin. Cells were stained with probe at a 1:100 dilution (NP, ORFS, RBD, PUUV, empty PE-SA) or 1:200 dilution (spike, endemic HCoV spikes). Cells were subsequently washed with 1×PBS 0.2% BSA and stained with Live/Dead BV510 (Thermo Fisher) in 1×PBS for 15 minutes. Cells were washed again and re-suspended at a maximum of 4 million cells/mL in 1×PBS supplemented with 0.2% BSA and 2 mM Pierce Biotin for downstream cell sorting using the MACSQuantTyto cartridge sorting platform (Miltenyi). Cells that were viable/CD19⁺/antigen-PE⁺ or viable/CD19⁺/antigen-APC were sorted as probe positive. The PE⁺ and APC⁺ gates were drawn by use of FMO controls. Cells were then collected from the cartridge sorting chamber and used for downstream 10× Genomics analysis.

[0553] 3. 10× Genomics Library Construction

[0554] VDJ, 5°, and probe feature libraries were prepared using the 10× Chromium System (10× Genomics). The Chromium Single Cell 5° Library and Gel Bead v2 Kit, Human B Cell V(D)J Enrichment Kit, and Feature Barcode Library Kit were used. All steps were followed as listed in the manufacturer's instructions. Specifically, user guide CG000186 Rev D was used. Severe acute infected samples were pooled post-sort and hashtagged (Biolegend), and run as a single sample, to account for low cell numbers. Final libraries were pooled and sequenced using the NextSeq550 (Illumina) with 26 cycles apportioned for read 1, 8 cycles for the i7 index, and 134 cycles for read 2.

[0555] 4. Computational Analyses for Single Cell Sequencing Data

[0556] The inventors adopted Cell Ranger (version 3.0.2) for raw sequencing processing, including 5° gene expression analysis, antigen probe analysis, and immunoprofiling analysis of B cells. Based on Cell Ranger output, the inventors performed downstream analysis using Seurat (version 3.9.9, an R package, for transcriptome, cell surface protein and antigen probe analysis) and IgBlast (version 1.15, for immunoglobulin gene analysis). For transcriptome analysis, Seurat was used for cell quality control, data normalization, data scaling, dimension reduction (both linear and non-linear), clustering, differential expression analysis, batch effects correction, and data visualization. Unwanted cells were removed according to the number of detectable genes (number of genes <200 or >2500 were removed) and percentage of mitochondrial genes for each cell. A soft threshold of percentage of mitochondrial genes was set to the 95^{th} percentile of the current dataset distribution, and the soft threshold was subject to a sealing point of 10% as the maximum threshold in the case of particularly poor cell quality. Transcriptome data were normalized by a log-transform function with a scaling factor of whereas cell surface protein and antigen probe were normalized by a centered log-ratio (CLR) normalization. The inventors used variable genes in principal component analysis (PCA) and used the top 15 principal components (PCs) in non-linear dimension reduction and clustering. High-quality cells were then clustered by Louvain algorithm implemented in Seurat under the resolution of 0.6. Differentially expressed genes for each cell cluster were identified using a Wilcoxon rank-sum test implemented in Seurat. Batch effects correction analysis was performed using an Anchor method implemented in Seurat to remove batch effects across different datasets. All computational analyses were performed in R (version 3.6.3).

[0557] 5. ROGUE Scoring

[0558] To assess the quality of B cell subsets identified in this study the inventors used ROGUE scoring, an entropy-based metric for assessing the purity of single cell populations, adapted from a previous study (Liu et al., 2020). The expression entropy for each gene was calculated using “SE_fun” from the “ROGUE” package (version 1.0). Based on the expression entropy, the ROGUE score for each cluster was calculated using the “rogue” function from the same package with parameters “platform” set to “UMI” and “span” set to

[0559] 6. Antigen Probe Reactivity Assignment

[0560] Antigen probe signals were normalized by a centered log-ratio transformation individually for each subject. All B cells were sub-sequently clustered into multiple probe-specific groups according to their normalized probe signals. By investigating all normalized antigen-probe binding signals, the inventors arbitrarily set a threshold equal to 1 for all normalized probe signals to distinguish probe binding cells as “positive” or “negative.” Cells that were negative to all probes were clustered into the “negative” group; those positive to only one probe were clustered into corresponding probe-specific groups; and those that were positive to multiple probes were further investigated. Only cells whose top hit probe value was at least two-fold greater than their second hit probe value were clustered into the top hit probe-specific group; others were clustered into the “multi-reactive” group that indicates non-specific cells. To account for the inclusion of endemic HCoV spike protein reactivity in some samples, cells positive to both SARS2 spike and endemic spike were further clustered into a group the inventors assigned as “spike cross-reactive” in the code. For samples in which the inventors included separate SARS2 spike and RBD oligo tags, the inventors placed cells positive to both SARS2 spike and SARS2 RBD into the “spike” group.

[0561] 7. Gene Module Scoring

[0562] Scores for B cell-genotype-related gene modules (e.g., MBC score, naive score, ASC score, and GC emigrant score) were calculated using the “AddModuleScore” function from the Seurat package (Stuart et al., 2019). The naive score was calculated based on the genes BACH2, ZBTB16, APBB2, SPRY1, TCL1A, and IKZF2; the MBC score was calculated based on the genes CD27, CD86, RASSF6, TOX, TRERF 1, TRPV3, POU2AF, RORA, TNFRSF13B, CD80, and FCRL5; the ASC score was calculated based on genes PRDM1, MANF, XBP1, IL6R, BCL6, IRF4, TNFRSF17, and CD38; and the GC emigrant score was calculated based on genes NT5E, MK167, CD40, CD83, TNFRSF13B, MAP3K8, MAP3K1, and FAS.

[0563] 8. Selection of Antibodies for mAb Synthesis

[0564] Representative antibodies from each subject were chosen for synthesis by choosing random samplings of B cells that bound to a given antigen probe with higher intensity relative to all other probes. B cells with varying ranges of probe-binding intensities were chosen for confirmation by ELISAs. In addition, B cells representing select public clonal expansions were also chosen for cloning. B cells binding to all probes in a polyreactive manner were also chosen and validated for polyreactivity by polyreactivity ELISA (see methods below).

[0565] 9. Monoclonal Antibody Generation

[0566] Immunoglobulin heavy and light chain genes were obtained by 10× Genomics VDJ sequencing analysis and monoclonal antibodies (mAbs) were synthesized by Integrated DNA Technologies. Cloning, transfection, and mAb purification have been previously described (Guthmiller et al., 2019). Briefly, sequences were cloned into human IgG1 expression vectors using Gibson assembly, and heavy and light genes were co-transfected into 293T cells (Thermo Fisher). Secreted mAbs were then purified from the supernatant using protein A agarose beads (Thermo Fisher).

[0567] 10. Enzyme-Linked Immunosorbent Assay (ELISA)

[0568] High-protein binding microtiter plates (Costar) were coated with recombinant SARS-CoV-2 proteins at 2 mg/ml in 1×PBS overnight at 4° C. Plates were washed the next morning with 1×PBS 0.05% Tween and blocked with 1×PBS containing 20% fetal bovine serum (FBS) for 1 hour at 37° C. Antibodies were then serially diluted 1:3 starting at 10 mg/ml and incubated for 1 hour at 37° C. Horseradish peroxidase (HRP)-conjugated goat anti-human IgG antibody diluted 1:1000 (Jackson Immuno Research) was used to detect binding of mAbs, and plates were subsequently developed with Super Aquablue ELISA substrate (eBiosciences). Absorbance was measured at 405 nm on a microplate spectrophotometer (BioRad). To standardize the assays, control antibodies with known binding characteristics were included on each plate and the plates were developed when the absorbance of the control reached 3.0 OD₄₀₅ units. All experiments were performed in duplicate 2-3 times.

[0569] 11. Polyreactivity ELISA

[0570] Polyreactivity ELISAs were performed as previously described (Andrews et al., 2015; Bunker et al., 2017; Guthmiller et al., 2020). High-protein binding microtiter plates (Costar) were coated with 10 mg/ml calf thymus dsDNA (Thermo Fisher), 2 mg/ml Salmonella enterica serovar Typhimurium flagellin (Invitrogen), 5 mg/ml human insulin (Sigma-Aldrich), 10 mg/ml KLH (Invitrogen), and 10 mg/ml Escherichia coli LPS (Sigma-Aldrich) in 1×PBS. Plates were coated with 10 mg/ml cardiolipin in 100% ethanol and allowed to dry overnight. Plates were washed with water and blocked with 1×PBS/0.05% Tween/1 mM EDTA. MAbs were diluted 1 mg/ml in PBS and serially diluted 4-fold, and added to plates for 1.5 hours. Goat anti-human IgG-HRP (Jackson Immunoresearch) was diluted 1:2000 in PBS/0.05% Tween/1 mM EDTA and added to plates for 1 hour. Plates were developed with Super Aquablue ELISA substrate (eBioscience) until the positive control mAb, 3H9 (Shlomchik et al., 1987), reached an OD₄₀₅ of 3. All experiments were performed in duplicate.

[0571] 12. Neutralization Assay

[0572] The SARS-CoV-2/UW-001/Human/2020/Wisconsin (UW-001) virus was isolated from a mild case in February 2020 and used to assess neutralization ability of monoclonal antibodies (mAbs). Virus (˜500 plaque-forming units) was incubated with each mAb at a final concentration of 10 mg/ml. After a 30-minute incubation at 37° C., the virus/antibody mixture was used to inoculate Vero E6/TMPRSS2 cells seeded a day prior at 200,000 cells per well of a TC12 plate. After 30 minutes at 37° C., cells were washed three times to remove any unbound virus, and media containing antibody (10 mg/ml) was added back to each well. Two days after inoculation, cell culture supernatant was harvested and stored at −80° C. until needed. A non-relevant Ebola virus GP mAb and PBS were used as controls.

[0573] To determine the amount of virus in the cell culture supernatant of each well, a standard plaque-forming assay was performed. Confluent Vero E6/TMPRSS2 cells in a TC12 plate were infected with supernatant (undiluted, 10-fold dilutions from 10⁻¹ to 10⁻⁵) for 30 minutes at 37° C. After the incubation, cells were washed three times to remove unbound virus and 1.0% methylcellulose media was added over the cells. After an incubation of three days at 37° C., the cells were fixed and stained with crystal violet solution in order to count the number plaques at each dilution and determine virus concentration given as plaque-forming units (PFU)/ml.

[0574] 13. In Vivo Protection Assays

[0575] To evaluate the efficacy of RBD and NP monoclonal antibodies (mAbs) in vivo, groups of 4-5-week-old female Syrian golden hamsters (four animals in each group) were infected with SARS-CoV-2 at a dose of 10³ PFU by intranasal inoculation. One day later, the hamsters were treated by intraperitoneal injection with one of the mAbs at 5 mg/kg. Control groups of hamsters were injected with either sterile PBS or a non-relevant mAb (Ebola glycoprotein 133/3.16). Weights were recorded daily. Four days after the infection, nasal turbinate and lung samples were collected to determine viral loads in these tissues by standard plaque assay on Vero E6/TMPRRSS2 cells. All animal studies were conducted under BSL-3 containment with an approved protocol reviewed by the Institutional Animal Care and Use Committee at the University of Wisconsin.

[0576] Studies with mice were carried out in accordance with the recommendations in the Guide for the Care and Use of Laboratory Animals of the National Institutes of Health. The protocols were approved by the Institutional Animal Care and Use Committee at the Washington University School of Medicine (assurance number A3381-01). Virus inoculations were performed under anesthesia that was induced and maintained with ketamine hydrochloride and xylazine, and all efforts were made to minimize animal suffering. To evaluate the efficacy of ORF8 mAbs in vivo, eight-week-old heterozygous female K18-hACE c57BL/6J mice (strain: 2B6.Cg-Tg(K18-ACE2)2Prlmn/J) received 200 mg of each indicated mAb by intraperitoneal injection one day prior to intranasal inoculation with 10³ PFU of SARS-CoV-2 (n-CoV/USA_WA1/2020 strain). Weight change was monitored daily and lungs were harvested at 7 days post-infection. Viral RNA levels in lung homogenates were determined by qRT-PCR quantifying N gene copy number and compared to a standard curve as described previously (Winkler et al., 2020).

[0577] 14. Quantification and Statistical Analysis

[0578] All statistical analysis was performed using Prism software (Graphpad Version 9.0) or R. Chi-square tests were corrected for multiple comparisons using post hoc Chi-square test. Sample sizes (n) are indicated in corresponding figures or figure legends. The number of biological repeats for experiments and specific tests for statistical significance used are indicated in the figure legends. P values less than or equal to 0.05 were considered significant. *p<0.05, **p<0.01, ***p<0.001, ****p<0.0001.

### E. Tables

TABLE S1
Convalescent patient information, Related to FIGS. 10-15.

| | | | | | | | Symptom |
|---|---|---|---|---|---|---|---|
| | | | | | | Duration | start to |
| Subject | | | Reported | Severity | Severity | symptoms | donation |
| ID | Age | Sex | symptoms* | Score | Category | (days) | (days) |
| 24 | 34 | M | Fatigue, cough, SOB, | 19 | Severe | 12 | 41 |
| | | | SC, fever, headache, | | | | |
| | | | BAP, diarrhea, LOS, | | | | |
| | | | LOT | | | | |
| 20 | 31 | M | Fatigue, cough, SOB, | 29 | Critical | 19 | 48 |
| | | | SC, fever, headache, | | | | |
| | | | BAP, LOS, LOT | | | | |
| 564 | 24 | F | Fatigue, cough, SOB, | 24 | Severe | 32 | 60 |
| | | | SC, ST, fever, | | | | |
| | | | headache, BAP, | | | | |
| | | | diarrhea, LOS, LOT | | | | |
| 144 | 56 | M | Fatigue, cough, SC, | 17 | Moderate | 23 | 54 |
| | | | ST, headache, BAP, | | | | |
| | | | LOS | | | | |
| 214 | 47 | M | Fatigue, cough, SOB, | 20 | Severe | 24 | 59 |
| | | | SC, ST, headache, | | | | |
| | | | BAP, LOS, LOT | | | | |
| 171 | 37 | F | Fatigue, cough, SOB, | 21 | Severe | 16 | 44 |
| | | | SC, fever, headache, | | | | |
| | | | BAP, diarrhea, LOS, | | | | |
| | | | LOT | | | | |
| 92 | 35 | M | Fatigue, cough, SC, | 16 | Moderate | 16 | 47 |
| | | | ST, fever, headache, | | | | |
| | | | BAP | | | | |
| 48 | 45 | F | Fatigue, cough, SOB, | 19 | Severe | 8 | 40 |
| | | | SC, ST, fever, | | | | |
| | | | headache, AP, | | | | |
| | | | diarrhea, LOS, LOT | | | | |
| 537 | 36 | M | Fatigue, cough, | 13 | Moderate | 14 | 59 |
| | | | fever, BAP | | | | |
| 586 | 32 | F | Fatigue, cough, SOB, | 18 | Moderate | 17 | 61 |
| | | | SC, headache, BAP, | | | | |
| | | | AP. diarrhea | | | | |
| 376 | 36 | F | Diarrhea, LOS, LOT | 8 | Mild | 7 | 48 |
| 305 | 43 | F | Fatigue, cough, SC. | 14 | Moderate | 4 | 47 |
| | | | ST, fever, headache, | | | | |
| | | | BAP, LOS, LOT | | | | |
| 116 | 65 | F | Cough, SOB, fever, | 13 | Moderate | 18 | 49 |
| | | | LOS, LOT | | | | |
| 166 | 42 | F | Fatigue, cough, SOB, | 18 | Moderate | 17 | 55 |
| | | | SC, fever, headache, | | | | |
| | | | BAP, diarrhea, LOS, | | | | |
| | | | LOT | | | | |
| 155 | 47 | F | Fatigue, cough, SOB, | 20 | Severe | 29 | 64 |
| | | | ST, fever, BAP, LOS, | | | | |
| | | | LOT | | | | |
| 609 | 26 | F | Fatigue, SOB, ST, | 16 | Moderate | 7 | 57 |
| | | | fever, headache, | | | | |
| | | | BAP. LOS, LOT | | | | |
| 130 | 52 | M | Fatigue, SC, | 10 | Mild | 7 | 35 |
| | | | headache, LOS, LOT | | | | |
| 281 | 70 | M | Cough, fever, BAP | 9 | Mild | 7 | 48 |
| 272 | 42 | M | Fatigue, cough, SOB, | 18 | Moderate | 14 | 43 |
| | | | fever, headache, | | | | |
| | | | BAP, LOS, LOT | | | | |
| 50 | 35 | M | Fatigue, SC, fever, | 13 | Moderate | 10 | 40 |
| | | | BAP, LOS, LOT | | | | |
| 65 | 40 | F | Fatigue, SC, fever, | 16 | Moderate | 13 | 47 |
| | | | headache, BAP, | | | | |
| | | | diarrhea, LOS, LOT | | | | |
| 33 | 36 | M | Fatigue, cough, SOB, | 22 | Severe | 14 | 48 |
| | | | SC, fever, headache, | | | | |
| | | | BAP, AP, diarrhea, | | | | |
| | | | LOS. LOT | | | | |
| 201 | 56 | M | Fatigue, cough, SOB, | 20 | Severe | 18 | 58 |
| | | | SC, ST, fever, | | | | |
| | | | headache, BAP, | | | | |
| | | | LOS, LOT | | | | |
| 218 | 51 | F | Fatigue, cough, SOB, | 19 | Severe | 19 | 48 |
| | | | fever, headache, | | | | |
| | | | BAP, AP, diarrhea | | | | |
| 266 | 19 | F | Fatigue, cough, SC, | 9 | Mild | 4 | 32, 137 |
| | | | headache, BAP | | | | V2* |
| 356 | 51 | F | Fatigue, cough, ST, | 20 | Severe | 14 | 43, 137 |
| | | | fever, headache, | | | | V2* |
| | | | BAP, AP, diarrhea, | | | | |
| | | | LOS, LOT | | | | |
| 407 | 34 | M | Fatigue, cough, SC, | 16 | Moderate | 11 | 43, 131 |
| | | | fever, BAP, AP, | | | | V2* |
| | | | diarrhea, LOS, LOT | | | | |
| 210 | 47 | M | Fatigue, cough, SOB, | 16 | Moderate | 7 | 41, 125 |
| | | | fever, headache, | | | | V2* |
| | | | BAP, LOS, LOT | | | | |

*SOB = shortness of breath; SC = sinus congestion; ST = sore throat; BAP = body aches and pain; AP = abdominal pain; LOS = loss of smell; LOT = loss of taste. Starred symptom start to donation values indicate the value for follow-up visit donation (V2). Severity scoring method has been described previously (Guthmiller et al., 2021).

TABLE S2
Distribution of clinical parameters for convalescent patients
included in the study, Related to FIGS. 10-15

| | |
|---|---|
| Median Age | 41 |
| Mean Age | 42 |
| Mode Age | 47 |
| Range Age | 19-70 |
| Number of Males | 14 |
| Number of Females | 14 |
| Median Duration of Symptoms (days) | 14 |
| Mean Duration of Symptoms (days) | 14 |
| Mode Duration of Symptoms (days) | 7 |
| Range Duration of Symptoms (days) | 4-32 |
| Median symptom start to donation (days) | 48 |
| Mean symptom start to donation (days) | 49 |
| Mode symptom start to donation (days) | 48 |
| Range symptom start to donation (days) | 32-64 |

TABLE S3
Severe acute patient information, Related to FIGS. 10-12.

| | | | | Symptom | | |
|---|---|---|---|---|---|---|
| | | | | start to first | | |
| Subject | | | Reported | donation | | |
| ID | Age | Sex | symptoms* | (days) | Co-morbidities* | COVID treatment |
| R1 | 57 | M | Fever, cough, | 3 | HTN, DM, NAFLD | Tocilizumab, |
| | | | nausea | | | mechanical |
| | | | | | | ventilation |
| R2 | 61 | M | Cough, | 16 | None | Hydroxychloroquine, |
| | | | weakness, | | | nasal cannula |
| | | | hiccups, altered | | | |
| | | | mental status | | | |
| R3 | 51 | F | Fever, cough, | 21 | HTN, DM, PE, asthma | Remdesivir, |
| | | | dyspnea | | | tocilizumab, |
| | | | | | | venovenous ECMO* |
| R4 | 70 | F | Fever, altered | 2 | HTN, Alzheimer's | Nasal cannula |
| | | | mental status | | disease | |
| R5 | 66 | F | Altered mental | 9 | HTN, PE/DVT, recent | Nasal cannula |
| | | | status, dyspnea | | hospitalization for | |
| | | | | | orthopedic procedure | |
| R6 | 59 | M | Fever, chills, | 20 | HTN, DM | Remdesivir, |
| | | | decreased | | | tocilizumab, |
| | | | appetite, | | | Venovenous ECMO |
| | | | dizziness | | | |
| R7 | 57 | M | Dyspnea | 9 | HTN, Myelodysplastic | Tocilizumab, |
| | | | | | syndrome s/p stem | anakinra, nasal |
| | | | | | cell transplant | cannula |
| R8 | 30 | M | Fever, chills, | 13 | Cystic fibrosis s/p | Room air |
| | | | fatigue, LOT* | | bilateral lung | |
| | | | | | transplant, DM | |
| R9 | 78 | M | Fever, cough | 14 | HTN, prostate cancer | High-flow nasal |
| | | | | | | cannula |
| R10 | 86 | F | Dyspnea, | 6 | ESRD on HD, stroke, | Nasal cannula |
| | | | abdominal pain | | PVD s/p AKA, DM, | |
| | | | | | PE/DVT, CHF | |

*LOT: Loss of taste; ECMO: Extracorporeal membrane oxygenation.
*AKA, above the knee amputation; CHF, congestive heart failure; DM, diabetes mellitus; DVT, deep venous thrombosis; ESRD, end-stage renal disease; HTN, hypertension; NAFLD, non-alcoholic fatty liver disease; PE, pulmonary embolism; PVD, peripheral vascular disease

TABLE S4
Distribution of clinical parameters for severe acute patients
included in the study, Related to FIGS. 10-12.

| | |
|---|---|
| Median Age | 60 |
| Mean Age | 61.5 |
| Mode Age | 57 |
| Range Age | 30-86 |
| Number of Males | 6 |
| Number of Females | 4 |
| Median symptom start to first donation* (days) | 11 |
| Mean symptom start to first donation* (days) | 11 |
| Mode symptom start to first donation* (days) | 9 |
| Median symptom start to last donation* (days) | 25 |
| Mean symptom start to last donation* (days) | 25 |
| Mode symptom start to last donation* (days) | 23 |

*Samples were collected day 0 (pre-plasma transfusion), 1, 3, 5, and 14 post-plasma transfusion and all time points per subject were pooled for analysis due to low cell numbers. See methods for additional details.

TABLE S6
Key genes used in the identification of B cell subsets, Related to FIG. 11.

| Gene | B Cell Subset | Rationale | Citation |
|---|---|---|---|
| BACH2 | Naïve | Promotes B cell | (Itoh-Nakadai et al., |
| | | development, maintains | 2014) |
| | | mature B cells | |
| ZBTB16 | Naïve | Downregulated in | (Moroney et al., |
| | | memory compared to | 2020) |
| | | naïve | |
| APBB2 | Naïve | Foxp1 target important for | (Patzelt et al., 2018); |
| | | mature FO B cell survival | The Human Protein |
| | | | Atlas (Uhlen et al., |
| | | | 2015) |
| SPRY1 | Naïve | Proliferation inhibitor, | (Frank et al., 2009) |
| | | differentially expressed | The Human Protein |
| | | (DE) between naïve and | Atlas (Uhlen et al., |
| | | memory | 2015) |
| TCL1A | Naïve | DE between B cell pop. | (Said et al., 2001) |
| | | High in Naïve, low in GC, | |
| | | absent in memory and | |
| | | ASC | |
| IKZF2 | Naïve | DE between memory and | (Moroney et al., |
| | | naïve, higher in naïve | 2020) |
| CD27 | Memory | Classic memory marker | (Palm and Henry, |
| | | | 2019) |
| CD86 | Memory | DE between memory and | (Axelsson et al., |
| | | naïve, higher in memory | 2020) |
| RASSF6 | Memory | Increased in memory | (Moroney et al., |
| | | | 2020) |
| TOX | Memory | Increased in memory | (Moroney et al., |
| | | | 2020) |
| TRERF1 | Memory | Increased in memory | (Moroney et al., |
| | | | 2020) |
| TRPV3 | Memory | Increased in memory | (Moroney et al., |
| | | | 2020) |
| POU2AF1 | Memory | B cell-specific TF | (Zhao et al., 2008) |
| RORA | Memory | Increased in memory | (Moroney et al., |
| | | | 2020) |
| TNFRSF13B | Memory | BAFF-binding receptor | (Muller-Winkler et |
| | | expressed in memory and | al., 2021) |
| | | ASC | |
| CD80 | Memory | High affinity memory | (Palm and Henry. |
| | | marker | 2019) |
| FCLR5 | Memory | Atypical memory marker | (Kim et al., 2019) |
| GDPD5 | Class-switched | Highest in class-switched | The Human Protein |
| | Memory | memory B cells | Atlas (Uhlen et al., |
| | | | 2015) |
| BAIAP3 | Class-switched | DE in switched memory, | (Moroney et al., |
| | Memory | ion channel Ca²⁺ flux | 2020) |
| TGM2 | Class-switched | DE in switched memory, | (Moroney et al., |
| | Memory | Ca²⁺ signal transduction | 2020) |
| MUC16 | Class-switched | DE in class-switched | (Moroney et al., |
| | Memory | memory, membrane | 2020) |
| | | adhesion | |
| PRDM1 | ASC | Lineage-defining TF | (Lightman et al., |
| | | | 2019) |
| MANF | ASC | ER stress | (Lightman et al., |
| | | | 2019) |
| XBP1 | ASC | Unfolded protein | (Lightman et al., |
| | | response | 2019) |
| IL6R | ASC | Receptor for IL6, | (Dienz et al., 2009) |
| | | promotes PC fate and | |
| | | mAb production | |
| BCL6 | ASC | Drops in GCs to promote | (Palm and Henry, |
| | | PC fate | 2019) |
| IRF4 | ASC | Rises as BCL6 drops to | (Palm and Henry, |
| | | promote PC fate | 2019) |
| TNFSR17 | ASC | Genetic KOs experience | (Lightman et al., |
| | | sig PC reduction | 2019) |
| CD38 | ASC | Classic PC marker | (Lightman et al., |
| | | | 2019) |
| NT5E | GC emigrant/ | Important for class-switch | (Schena et al., 2013) |
| | recent MBC | | |
| MKI67 | GC emigrant/ | Proliferation marker | (Scholzen and |
| | recent MBC | | Gerdes, 2000) |
| CD40 | GC emigrant/ | Required for memory | (Basso et al., 2004) |
| | recent MBC | formation | |
| CD83 | GC emigrant/ | GC composition | (Krzyzak et al., |
| | recent MBC | | 2016) |
| MAP3K8 | GC emigrant/ | DE during GC reaction | (Wohner et al., 2016) |
| | recent MBC | | |
| MAP3K1 | GC emigrant/ | Required for CD40 | (Gallagher et al., |
| | recent MBC | signaling | 2007) |
| FAS | GC emigrant/ | DE during GC reaction | (Smith et al., 1995) |
| | recent MBC | | |
| Marginal Zone | Marginal Zone | DE in MZBs | (Descatoire et al., |
| genes | B cells | | 2014) |
| SPN | B1 B Cells | Classic B1 marker | (Rothstein et al., |
| | | | 2013) |
| MYO1D | B1 B Cells | DE in B1s | (Macias-Garcia et |
| | | | al., 2016) |
| PLSCR1 | B1 B Cells | Expressed in natural | Cordero et al |
| | | ASCs | |
| PSTPIP2 | B1 B Cell | DE during activation | (Ochiai et al., 2020) |
| AHR | B1 B Cell | Highest expression in B1 | (Villa et al., 2017) |
| CD300LF | B1 B Cell | DE in B1s | (Macias-Garcia et |
| | | | al., 2016) |
| LYSMD2- | B1 B Cell | DE in mouse B1s | (Mabbott and Gray, |
| GPR55 | | | 2014) |
| IZUMO1R | B1 B Cell | DE in B1s | (Macias-Garcia et |
| | | | al., 2016) |
| TNFSF13B- | Innate-like B | Highly expressed in MZB | (Smulski and Eibel, |
| MYD88 | cells | and B1 | 2018) |

### F. References

[0580] The following references, to the extent that they provide exemplary procedural or other details supplementary to those set forth herein, are specifically incorporated herein by reference.
[0581] 1. Amanat, F., Stadlbauer, D., Strohmeier, S., Nguyen, T. H. O., Chromikova, V., McMahon, M., Jiang, K., Asthagiri Arunkumar, G., Jurczyszak, D., Polanco, J., et al. (2020). A serological assay to detect SARS-CoV-2 seroconversion in humans. medRxiv.
[0582] 2. Andrews, S. F., Huang, Y., Kaur, K., Popova, L. I., Ho, I. Y., Pauli, N. T., Henry Dunand, C. J., Taylor, W. M., Lim, S., Huang, M., et al. (2015). Immune history profoundly affects broadly protective B cell responses to influenza. Sci. Transl. Med. 7, 316ra192.
[0583] 3. Atyeo, C., Fischinger, S., Zohar, T., Slein, M. D., Burke, J., Loos, C., McCulloch, D. J., Newman, K. L., Wolf, C., Yu, J., et al. (2020). Distinct early serological signatures track with SARS-CoV-2 survival. Immunity 53, 524-532.e4.
[0584] 4. Axelsson, S., Magnuson, A., Lange, A., Alshamari, A., Hornquist, E. H., and Hultgren, (2020). A combination of the activation marker CD86 and the immune checkpoint marker B and T lymphocyte attenuator (BTLA) indicates a putative permissive activation state of B cell subtypes in healthy blood donors independent of age and sex. BMC Immunol. 21, 14.
[0585] 5. Basso, K., Klein, U., Niu, H., Stolovitzky, G. A., Tu, Y., Califano, A., Cattoretti, G., and Dalla-Favera, R. (2004). Tracking CD40 signaling during germinal center development. Blood 104, 4088-4096.
[0586] 6. Bunker, J. J., Erickson, S. A., Flynn, T. M., Henry, C., Koval, J. C., Meisel, M., Jabri, B., Antonopoulos, D. A., Wilson, P. C., and Bendelac, A. (2017). Natural polyreactive IgA antibodies coat the intestinal microbiota. Science 358, eaan6619.
[0587] 7. Chen, F., Tzarum, N., Wilson, I. A., and Law, M. (2019). VH1-69 antiviral broadly neutralizing antibodies: genetics, structures, and relevance to rational vaccine design. Curr. Opin. Virol. 34, 149-159.
[0588] 8. Chen, X., Li, R., Pan, Z., Qian, C., Yang, Y., You, R., Zhao, J., Liu, P., Gao, L., Li, Z., et al. (2020). Human monoclonal antibodies block the binding of SARS-CoV-2 spike protein to angiotensin converting enzyme 2 receptor. Cell. Mol. Immunol. 17, 647-649.
[0589] 9. Dan, J. M., Mateus, J., Kato, Y., Hastie, K. M., Yu, E. D., Faliti, C. E., Grifoni, A., Ramirez, S. I., Haupt, S., Frazier, A., et al. (2021). Immunological memory to SARS-CoV-2 assessed for up to 8 months after infection. Science 371, eabf4063.
[0590] 10. Descatoire, M., Weller, S., Irtan, S., Sarnacki, S., Feuillard, J., Storck, S., Guiochon-Mantel, A., Bouligand, J., Morali, A., Cohen, J., et al. (2014). Identification of a human splenic marginal zone B cell precursor with NOTCH2-dependent differentiation properties. J. Exp. Med. 211, 987-1000.
[0591] 11. Dienz, O., Eaton, S. M., Bond, J. P., Neveu, W., Moquin, D., Noubade, R., Briso, E. M., Charland, C., Leonard, W. J., Ciliberto, G., et al. (2009). The induction of antibody production by IL-6 is indirectly mediated by IL-21 produced by CD4+ T cells. J. Exp. Med. 206, 69-78.
[0592] 12. Dugan, H. L., Guthmiller, J. J., Arevalo, P., Huang, M., Chen, Y. Q., Neu, K. E., Henry, C., Zheng, N. Y., Lan, L. Y., Tepora, M. E., et al. (2020a). Preexisting immunity shapes distinct antibody landscapes after influenza virus infection and vaccination in humans. Sci. Transl. Med. 12, eabd3601.
[0593] 13. Dugan, H. L., Henry, C., and Wilson, P. C. (2020b). Aging and influenza vaccine-induced immunity. Cell. Immunol. 348, 103998.
[0594] 14. Frank, M. J., Dawson, D. W., Bensinger, S. J., Hong, J. S., Knosp, W. M., Xu, L., Balatoni, C. E., Allen, E. L., Shen, R. R., Bar-Sagi, D., et al. (2009). Expression of sprouty2 inhibits B-cell proliferation and is epigenetically silenced in mouse and human B-cell lymphomas. Blood 113, 2478-2487.
[0595] 15. Gaebler, C., Wang, Z., Lorenzi, J. C. C., Muecksch, F., Finkin, S., Tokuyama, M., Cho, A., Jankovic, M., Schaefer-Babajew, D., Oliveira, T. Y., et al. (2021). Evolution of antibody immunity to SARS-CoV-2. Nature 591, 639-644.
[0596] 16. Gallagher, E., Enzler, T., Matsuzawa, A., Anzelon-Mills, A., Otero, D., Holzer, R., Janssen, E., Gao, M., and Karin, M. (2007). Kinase MEKK1 is required for CD40-dependent activation of the kinases Jnk and p38, germinal center formation, B cell proliferation and antibody production. Nat. Immunol. 8, 57-63.
[0597] 17. Grifoni, A., Weiskopf, D., Ramirez, S. I., Mateus, J., Dan, J. M., Moderbacher, C. R., Rawlings, S. A., Sutherland, A., Premkumar, L., Jadi, R. S., et al (2020). Targets of T cell responses to SARS-CoV-2 coronavirus in humans with COVED-19 disease and unexposed individuals. Cell 181, 1489-1501.e15.
[0598] 18. Guthmiller, J. J., Dugan, H. L., Neu, K. E., Lan, L. Y., and Wilson, P. C. (2019). An efficient method to generate monoclonal antibodies from human B cells. Methods Mol. Biol. 1904, 109-145.
[0599] 19. Guthmiller, J. J., Lan, L. Y., ndez-Quintero, M. L., Han, J., Utset, H. A., Bitar, D. J., Hamel, N.J., Stovicek, O., Li, L., Tepora, M., et al. (2020). Polyreactive broadly neutralizing B cells are selected to provide defense against pandemic threat influenza viruses. Immunity 53, 1230-1244.e5.
[0600] 20. Guthmiller, J. J., Stovicek, O., Wang, J., Changrob, S., Li, L., Halfmann, P., Zheng, N. Y., Utset, H., Stamper, C. T., Dugan, H. L., et al. (2021). SARS-CoV-2 infection severity is linked to superior humoral immunity against the spike. MBio 12, e02940-20.
[0601] 21. Hartley, G. E., Edwards, E. S. J., Aui, P. M., Varese, N., Stojanovic, S.,
[0602] 22. McMahon, J., Peleg, A. Y., Boo, I., Drummer, H. E., Hogarth, P. M., et al. (2020). Rapid generation of durable B cell memory to SARS-CoV-2 spike and nucleocapsid proteins in COVID-19 and convalescence. Sci. Immunol. 5, eabf8891.
[0603] 23. Henry, C., Zheng, N.Y., Huang, M., Cabanov, A., Rojas, K. T., Kaur, K., Andrews, S. F., Palm, A. E., Chen, Y. Q., Li, Y., et al. (2019). Influenza virus vaccination elicits poorly adapted B cell responses in elderly individuals. Cell Host Microbe 25, 357-366.e6.
[0604] 24. Itoh-Nakadai, A., Hikota, R., Muto, A., Kometani, K., Watanabe-Matsui, M., Sato, Y., Kobayashi, M., Nakamura, A., Miura, Y., Yano, Y., et al. (2014). The transcription repressors Bach2 and Bach1 promote B cell development by repressing the myeloid program. Nat. Immunol. 15, 1171-1180.
[0605] 25. Kim, C. C., Baccarella, A. M., Bayat, A., Pepper, M., and Fontana, M. F. (2019). FCRL5+ memory B cells exhibit robust recall responses. Cell Rep. 27, 1446— 1460.e4.
[0606] 26. Krzyzak, L., Seitz, C., Urbat, A., Hutzler, S., Ostalecki, C., Gla€sner, J., Hiergeist, A., Gessner, A., Winkler, T. H., Steinkasserer, A., and Nitschke, L. (2016). CD83 modulates B cell activation and germinal center responses. J. Immunol. 196, 3581-3594.
[0607] 27. Lan, J., Ge, J., Yu, J., Shan, S., Zhou, H., Fan, S., Zhang, Q., Shi, X., Wang, Q., Zhang, L., and Wang, X. (2020). Structure of the SARS-CoV-2 spike receptor-binding domain bound to the ACE2 receptor. Nature 581, 215-220.
[0608] 28. Le Bert, N., Tan, A. T., Kunasegaran, K., Tham, C. Y. L., Hafezi, M., Chia, A.,
[0609] 29. Chng, M. H. Y., Lin, M., Tan, N., Linster, M., et al. (2020). SARS-CoV-2-specific T cell immunity in cases of COVID-19 and SARS, and uninfected controls. Nature 584, 457-462.
[0610] 30. Lightman, S. M., Utley, A., and Lee, K. P. (2019). Survival of long-lived plasma cells (LLPC): piecing together the puzzle. Front. Immunol. 10, 965.
[0611] 31. Liu, B., Li, C., Li, Z., Wang, D., Ren, X., and Zhang, Z. (2020). An entropy-based metric for assessing the purity of single cell populations. Nat. Commun. 11, 3155.
[0612] 32. Lu, S., Ye, Q., Singh, D., Cao, Y., Diedrich, J. K., Yates, J. R., 3rd, Villa, E., Cleveland, D. W., and Corbett, K. D. (2021). The SARS-CoV-2 nucleocapsid phosphoprotein forms mutually exclusive condensates with RNA and the membrane-associated M protein. Nat. Commun. 12, 502.
[0613] 33. Mabbott, N. A., and Gray, D. (2014). Identification of co-expressed gene signatures in mouse B1, marginal zone and B2 B-cell populations. Immunology 141, 79-95.
[0614] 34. Macias-Garcia, A., Heizmann, B., Sellars, M., Marchal, P., Dali, H., Pasquali, J. L., Muller, S., Kastner, P., and Chan, S. (2016). Ikaros is a negative regulator of B1 cell development and function. J. Biol. Chem. 291, 9073-9086.
[0615] 35. Moroney, J. B., Vasudev, A., Pertsemlidis, A., Zan, H., and Casali, P. (2020). Integrative transcriptome and chromatin landscape analysis reveals distinct epigenetic regulations in human memory B cells. Nat. Commun. 11, 5435.
[0616] 36. Mu€ller-Winkler, J., Mitter, R., Rappe, J. C. F., Vanes, L., Schweighoffer, E., Mohammadi, H., Wack, A., and Tybulewicz, V. L. J. (2021). Critical requirement for BCR, BAFF, and BAFFR in memory B cell survival. J. Exp. Med. 218, e20191393.
[0617] 37. Nelson, C. A., Lee, C. A., and Fremont, D. H. (2014). Oxidative refolding from inclusion bodies. Methods Mol. Biol. 1140, 145-157.
[0618] 38. Nelson, C. A., Pekosz, A., Lee, C. A., Diamond, M. S., and Fremont, D. H. (2005). Structure and intracellular targeting of the SARS-coronavirus Orf7a accessory protein. Structure 13, 75-85.
[0619] 39. Ng, K. W., Faulkner, N., Cornish, G. H., Rosa, A., Harvey, R., Hussain, S., Ulferts, R., Earl, C., Wrobel, A. G., Benton, D. J., et al. (2020). Preexisting and de novo humoral immunity to SARS-CoV-2 in humans. Science 370, 1339-1343.
[0620] 40. Ochiai, K., Yamaoka, M., Swaminathan, A., Shima, H., Hiura, H., Matsumoto, M., Kurotaki, D., Nakabayashi, J., Funayama, R., Nakayama, K., et al. (2020). Chromatin protein PC4 orchestrates B cell differentiation by collaborating with IKAROS and IRF4. Cell Rep. 33, 108517.
[0621] 41. Palm, A. E., and Henry, C. (2019). Remembrance of things past: long-term B cell memory after infection and vaccination. Front. Immunol. 10, 1787.
[0622] 42. Patzelt, T., Keppler, S. J., Gorka, O., Thoene, S., Wartewig, T., Reth, M., Förster, I., Lang, R., Buchner, M., and Ruland, J. (2018). Foxpl controls mature B cell survival and the development of follicular and B-1 B cells. Proc. Natl. Acad. Sci. USA 115, 3120-3125.
[0623] 43. Peng, Y., Mentzer, A. J., Liu, G., Yao, X., Yin, Z., Dong, D., Dejnirattisai, W., Rostron, T., Supasa, P., Liu, C., et al. (2020). Broad and strong memory CD4(+) and CD8(+) T cells induced by SARS-CoV-2 in UK convalescent individuals following COVID-19. Nat. Immunol. 21, 1336-1345.
[0624] 44. Robbiani, D. F., Gaebler, C., Muecksch, F., Lorenzi, J. C. C., Wang, Z., Cho, A., Agudelo, M., Barnes, C. O., Gazumyan, A., Finkin, S., et al. (2020). Convergent antibody responses to SARS-CoV-2 in convalescent individuals. Nature 584, 437-442.
[0625] 45. Rodda, L. B., Netland, J., Shehata, L., Pruner, K. B., Morawski, P. A., Thouvenel, C. D., Takehara, K. K., Eggenberger, J., Hemann, E. A., Waterman, H. R., et al. (2021). Functional SARS-CoV-2-specific immune memory persists after mild COVID-19. Cell 184, 169-183.e17.
[0626] 46. Rothstein, T. L., Griffin, D. O., Holodick, N. E., Quach, T. D., and Kaku, H. (2013). Human B-1 cells take the stage. Ann. N Y Acad. Sci. 1285, 97-114.
[0627] 47. Said, J. W., Hoyer, K. K., French, S. W., Rosenfelt, L., Garcia-Lloret, M., Koh, P. J., Cheng, T. C., Sulur, G. G., Pinkus, G. S., Kuehl, W. M., et al. (2001). TCL1 oncogene expression in B cell subsets from lymphoid hyperplasia and distinct classes of B cell lymphoma. Lab. Invest. 81, 555-564.
[0628] 48. Sakharkar, M., Rappazzo, C. G., Wieland-Alter, W. F., Hsieh, C. L., Wrapp, D., Esterman, E. S., Kaku, Wec, A. Z., Geoghegan, J. C., McLellan, J. S., et al. (2021). Prolonged evolution of the human B cell response to SARS-CoV-2 infection. Sci. Immunol. 6, eabg6916.
[0629] 49. Schena, F., Volpi, S., Faliti, C. E., Penco, F., Santi, S., Proietti, M., Schenk, U., Damonte, G., Salis, A., Bellotti, M., et al. (2013). Dependence of immunoglobulin class switch recombination in B cells on vesicular release of ATP and CD73 ectonucleotidase activity. Cell Rep. 3, 1824-1831.
[0630] 50. Scholzen, T., and Gerdes, J. (2000). The Ki-67 protein: from the known and the unknown. J. Cell. Physiol. 182, 311-322.
[0631] 51. Shlomchik, M. J., Aucoin, A. H., Pisetsky, D. S., and Weigert, M. G. (1987). Structure and function of anti-DNA autoantibodies derived from a single autoimmune mouse. Proc. Natl. Acad. Sci. USA 84, 9150-9154.
[0632] 52. Smith, K. G., Nossal, G. J., and Tarlinton, D. M. (1995). FAS is highly expressed in the germinal center but is not required for regulation of the B-cell response to antigen. Proc. Natl. Acad. Sci. USA 92, 11628-11632.
[0633] 53. Smulski, C. R., and Eibel, H. (2018). BAFF and BAFF-receptor in B cell selection and survival. Front. Immunol. 9, 2285.
[0634] 54. Sokal, A., Chappert, P., Barba-Spaeth, G., Roeser, A., Fourati, S., Azzaoui, I., Vandenberghe, A., Fernandez, I., Meola, A., Bouvier-Alias, M., et al. (2021). Maturation and persistence of the anti-SARS-CoV-2 memory B cell response. Cell 184, 1201-1213.e14.
[0635] 55. Stadlbauer, D., Amanat, F., Chromikova, V., Jiang, K., Strohmeier, S., Arunkumar, G. A., Tan, J., Bhaysar, D., Capuano, C., Kirkpatrick, E., et al. (2020). SARS-CoV-2 seroconversion in humans: a detailed protocol for a serological assay, antigen production, and test setup. Curr. Protoc. Microbiol. 57, e100.
[0636] 56. Stuart, T., Butler, A., Hoffman, P., Hafemeister, C., Papalexi, E., Mauck, W. M., 3rd, Hao, Y., Stoeckius, M., Smibert, P., and Satij a, R. (2019). Comprehensive integration of single-cell data. Cell 177, 1888-1902.e21.
[0637] 57. Uhlén, M., Fagerberg, L., Hallström, B. M., Lindskog, C., Oksvold, P., Mardinoglu, A., Sivertsson, A°., Kampf, C., Sjöstedt, E., Asplund, A., et al. (2015). Proteomics. Tissue-based map of the human proteome. Science 347, 1260419.
[0638] 58. Villa, M., Gialitakis, M., Tolaini, M., Ahlfors, H., Henderson, C. J., Wolf, C. R., Brink, R., and Stockinger, B. (2017). Aryl hydrocarbon receptor is required for optimal B-cell proliferation. EMBO J. 36, 116-128.
[0639] 59. Wang, C., Li, W., Drabek, D., Okba, N. M. A., van Haperen, R., Osterhaus, A. D. M. E., van Kuppeveld, F. J. M., Haagmans, B. L., Grosveld, F., and Bosch,
[0640] 60. B. J. (2020). A human monoclonal antibody blocking SARS-CoV-2 infection. Nat. Commun. 11, 2251.
[0641] 61. Wec, A. Z., Wrapp, D., Herbert, A. S., Maurer, D. P., Haslwanter, D., Sakharkar, M., Jangra, R. K., Dieterle, M. E., Lilov, A., Huang, D., et al. (2020). Broad neutralization of SARS-related viruses by human monoclonal antibodies. Science 369, 731-736.
[0642] 62. Winkler, E. S., Bailey, A. L., Kafai, N. M., Nair, S., McCune, B. T., Yu, J., Fox, J. M., Chen, R. E., Earnest, J. T., Keeler, S. P., et al. (2020). Publisher correction: SARS-CoV-2 infection of human ACE2-transgenic mice causes severe lung inflammation and impaired function. Nat. Immunol. 21, 1470.
[0643] 63. Wo hner, M., Tagoh, H., Bilic, I., Jaritz, M., Poliakova, D. K., Fischer, M., and Busslinger, M. (2016). Molecular functions of the transcription factors E2A and E2-2 in controlling germinal center B cell and plasma cell development. J. Exp. Med. 213, 1201-1221.
[0644] 64. World Health Organization (2021). WHO Coronavirus (COVID-19) Dashboard. https://covid19.who.int/.
[0645] 65. Yan, R., Zhang, Y., Li, Y., Xia, L., Guo, Y., and Zhou, Q. (2020). Structural basis for the recognition of SARS-CoV-2 by full-length human ACE2. Science 367, 1444-1448.
[0646] 66. Yao, H., Song, Y., Chen, Y., Wu, N., Xu, J., Sun, C., Zhang, J., Weng, T., Zhang, Z., Wu, Z., et al. (2020). Molecular architecture of the SARS-CoV-2 virus. Cell 183, 730-738.e13.
[0647] 67. Yi, C., Sun, X., Ye, J., Ding, L., Liu, M., Yang, Z., Lu, X., Zhang, Y., Ma, L., Gu,
[0648] 68. W., et al. (2020). Key residues of the receptor binding motif in the spike protein of SARS-CoV-2 that interact with ACE2 and neutralizing antibodies. Cell. Mol. Immunol. 17, 621-630.
[0649] 69. Zhao, C., Inoue, J., Imoto, I., Otsuki, T., Iida, S., Ueda, R., and Inazawa, J. (2008). POU2AF 1, an amplification target at 11q23, promotes growth of multiple myeloma cells by directly regulating expression of a B-cell maturation factor, TNERSF17. Oncogene 27, 63-75.

[0650] All of the methods disclosed and claimed herein can be made and executed without undue experimentation in light of the present disclosure. While the compositions and methods of this invention have been described in terms of preferred embodiments, it will be apparent to those of skill in the art that variations may be applied to the methods and in the steps or in the sequence of steps of the method described herein without departing from the concept, spirit and scope of the invention. More specifically, it will be apparent that certain agents which are both chemically and physiologically related may be substituted for the agents described herein while the same or similar results would be achieved. All such similar substitutes and modifications apparent to those skilled in the art are deemed to be within the spirit, scope and concept of the invention as defined by the appended claims.

The application's sequence listing, which the Patent Office published only in electronic form, follows.

SEQUENCE LISTING (2812 sequences)

SEQ ID NO: 1 - protein, 182 aa, Human
QVQLQESGPGLVRPSETLSLTCTVSGGSISSHYWSWIRQPPGKGLEWIGYIYYSGSTNYNPSLKSRVTISVDTSKNQFSLKLISVTAADTAVYYCARAGGVFGVVLDFDHWGRGTLVTVSSASTKGPSVFPLAPSSKSTSGGTAALGCLVKDYFPEPVTVSWNSGALTSGVHTFPAVLQSSG

SEQ ID NO: 2 - protein, 121 aa, Human
QVQLQESGPGLVRPSETLSLTCTVSGGSISSHYWSWIRQPPGKGLEWIGYIYYSGSTNYNPSLKSRVTISVDTSKNQFSLKLISVTAADTAVYYCARAGGVFGVVLDFDHWGRGTLVTVSS

SEQ ID NO: 3 - protein, 5 aa, Human
SHYWS

SEQ ID NO: 4 - protein, 16 aa, Human
YIYYSGSTNYNPSLKS

SEQ ID NO: 5 - protein, 13 aa, Human
AGGVFGVVLDFDH

SEQ ID NO: 6 - protein, 30 aa, Human
QVQLQESGPGLVRPSETLSLTCTVSGGSIS

SEQ ID NO: 7 - protein, 14 aa, Human
WIRQPPGKGLEWIG

SEQ ID NO: 8 - protein, 32 aa, Human
RVTISVDTSKNQFSLKLISVTAADTAVYYCAR

SEQ ID NO: 9 - protein, 11 aa, Human
WGRGTLVTVSS

SEQ ID NO: 10 - protein, 178 aa, Human
SYVLTQPPSVSVAPGQTARITCGGNNIGSKSVHWYQQKPGQAPVLVVYDDSDRPSGIPERFSGSNSGNTATLTISRVEAGDEADYYCQVWDSSSEHYVFGTGTKVTVLGQPKANPTVTLFPPSSEELQANKATLVCLISDFYPGAVTVAWKADGSPVKAGVETTKPSKQSNNKYAASS

SEQ ID NO: 11 - protein, 108 aa, Human
SYVLTQPPSVSVAPGQTARITCGGNNIGSKSVHWYQQKPGQAPVLVVYDDSDRPSGIPERFSGSNSGNTATLTISRVEAGDEADYYCQVWDSSSEHYVFGTGTKVTVL

SEQ ID NO: 12 - protein, 11 aa, Human
GGNNIGSKSVH

SEQ ID NO: 13 - protein, 7 aa, Human
DDSDRPS

SEQ ID NO: 14 - protein, 11 aa, Human
QVWDSSSEHYV

SEQ ID NO: 15 - protein, 22 aa, Human
SYVLTQPPSVSVAPGQTARITC

SEQ ID NO: 16 - protein, 15 aa, Human
WYQQKPGQAPVLVVY

SEQ ID NO: 17 - protein, 32 aa, Human
GIPERFSGSNSGNTATLTISRVEAGDEADYYC

SEQ ID NO: 18 - protein, 10 aa, Human
FGTGTKVTVL

SEQ ID NO: 19 - protein, 183 aa, Human
QVQLQESGPGLVKPSETLSLTCTVSGGSISSFYWGWIRQPAGKGLEWIGRFHTSGSTNYNPSFKSRVTMSVDTSKNQFSLKLTSVTAADTAVYYCASGRGSSWYVGWFFDLWGRGTLVTVSSASTKGPSVFPLAPSSKSTSGGTAALGCLVKDYFPEPVTVSWNSGALTSGVHTFPAVLQSSG

SEQ ID NO: 20 - protein, 122 aa, Human
QVQLQESGPGLVKPSETLSLTCTVSGGSISSFYWGWIRQPAGKGLEWIGRFHTSGSTNYNPSFKSRVTMSVDTSKNQFSLKLTSVTAADTAVYYCASGRGSSWYVGWFFDLWGRGTLVTVSS

SEQ ID NO: 21 - protein, 5 aa, Human
SFYWG

SEQ ID NO: 22 - protein, 16 aa, Human
RFHTSGSTNYNPSFKS

SEQ ID NO: 23 - protein, 14 aa, Human
GRGSSWYVGWFFDL

SEQ ID NO: 24 - protein, 30 aa, Human
QVQLQESGPGLVKPSETLSLTCTVSGGSIS

SEQ ID NO: 25 - protein, 14 aa, Human
WIRQPAGKGLEWIG

SEQ ID NO: 26 - protein, 32 aa, Human
RVTMSVDTSKNQFSLKLTSVTAADTAVYYCAS

SEQ ID NO: 27 - protein, 11 aa, Human
WGRGTLVTVSS

SEQ ID NO: 28 - protein, 158 aa, Human
DIVMTQSPDSLAVSLGERATINCKSSQTVLYSSNNKNYLAWYQQKPGQPPKLLIYWASTRESGVPDRFSGSGSGTDFTLTISSLQAGDVAVYYCQQYYNTPDTFGGGTKVEINRTVAAPSVFIFPPSDEQLKSGTASVVCLLNNFYPREAKVQWKVDN

SEQ ID NO: 29 - protein, 112 aa, Human
DIVMTQSPDSLAVSLGERATINCKSSQTVLYSSNNKNYLAWYQQKPGQPPKLLIYWASTRESGVPDRFSGSGSGTDFTLTISSLQAGDVAVYYCQQYYNTPDTFGGGTKVEI

SEQ ID NO: 30 - protein, 17 aa, Human
KSSQTVLYSSNNKNYLA

SEQ ID NO: 31 - protein, 7 aa, Human
WASTRES

SEQ ID NO: 32 - protein, 9 aa, Human
QQYYNTPDT

SEQ ID NO: 33 - protein, 23 aa, Human
DIVMTQSPDSLAVSLGERATINC

SEQ ID NO: 34 - protein, 15 aa, Human
WYQQKPGQPPKLLIY

SEQ ID NO: 35 - protein, 32 aa, Human
GVPDRFSGSGSGTDFTLTISSLQAGDVAVYYC

SEQ ID NO: 36 - protein, 9 aa, Human
FGGGTKVEI

SEQ ID NO: 37 - protein, 183 aa, Human
QVQLIQSGAEVKKPGASVKVSCTASGYSLNELPIQWVRQAPGKGLEWMGEFDPEDGETIYAEKFQGRVTLTEETSTNTAYMELSSLKSEDTAAYFCSTGSTIGVVIYAFAIWGQGTMVTVSSASTKGPSVFPLAPCSRSTSESTAALGCLVKDYFPEPVTVSWNSGALTSGVHTFPAVLQSSG

SEQ ID NO: 38 - protein, 122 aa, Human
QVQLIQSGAEVKKPGASVKVSCTASGYSLNELPIQWVRQAPGKGLEWMGEFDPEDGETIYAEKFQGRVTLTEETSTNTAYMELSSLKSEDTAAYFCSTGSTIGVVIYAFAIWGQGTMVTVSS

SEQ ID NO: 39 - protein, 5 aa, Human
ELPIQ

SEQ ID NO: 40 - protein, 17 aa, Human
EFDPEDGETIYAEKFQG

SEQ ID NO: 41 - protein, 13 aa, Human
GSTIGVVIYAFAI

SEQ ID NO: 42 - protein, 30 aa, Human
QVQLIQSGAEVKKPGASVKVSCTASGYSLN

SEQ ID NO: 43 - protein, 14 aa, Human
WVRQAPGKGLEWMG

SEQ ID NO: 44 - protein, 32 aa, Human
RVTLTEETSTNTAYMELSSLKSEDTAAYFCST

SEQ ID NO: 45 - protein, 11 aa, Human
WGQGTMVTVSS

SEQ ID NO: 46 - protein, 187 aa, Human
EIVLTQSPGTLSLSPGERATLSCRASQDITNNFLAWYQQKAGQAPKLFIYGASRRAPGIPHRFSGSGSGTDFTLTISSLEPEDFAVYYCQQYGPSPTFGQGTKVEIKRTVAAPSVFIFPPSDEQLKSGTASVVCLLNNFYPREAKVQWKVDNALQSGNSQESVTEQDSKDSTYSLSSTLTLSKADYE

SEQ ID NO: 47 - protein, 107 aa, Human
EIVLTQSPGTLSLSPGERATLSCRASQDITNNFLAWYQQKAGQAPKLFIYGASRRAPGIPHRFSGSGSGTDFTLTISSLEPEDFAVYYCQQYGPSPTFGQGTKVEIK

SEQ ID NO: 48 - protein, 12 aa, Human
RASQDITNNFLA

SEQ ID NO: 49 - protein, 7 aa, Human
GASRRAP

SEQ ID NO: 50 - protein, 8 aa, Human
QQYGPSPT

SEQ ID NO: 51 - protein, 23 aa, Human
EIVLTQSPGTLSLSPGERATLSC

SEQ ID NO: 52 - protein, 15 aa, Human
WYQQKAGQAPKLFIY

SEQ ID NO: 53 - protein, 32 aa, Human
GIPHRFSGSGSGTDFTLTISSLEPEDFAVYYC

SEQ ID NO: 54 - protein, 10 aa, Human
FGQGTKVEIK

SEQ ID NO: 55 - protein, 141 aa, Human
QVQLQESGPGLVKPSETLSLTCTVSGGSISSYYWSWIRQPAGKGLEWIGRIYTSGSTNYNPSLKSRVTMSVDTSKNQFSLKLSSVTAADTAVYYCARGGSGWRFDYWGQGTLVTVSSGSASAPTLFPLVSCENSPSDTSSV

SEQ ID NO: 56 - protein, 117 aa, Human
QVQLQESGPGLVKPSETLSLTCTVSGGSISSYYWSWIRQPAGKGLEWIGRIYTSGSTNYNPSLKSRVTMSVDTSKNQFSLKLSSVTAADTAVYYCARGGSGWRFDYWGQGTLVTVSS

SEQ ID NO: 57 - protein, 5 aa, Human
SYYWS

SEQ ID NO: 58 - protein, 16 aa, Human
RIYTSGSTNYNPSLKS

SEQ ID NO: 59 - protein, 9 aa, Human
GGSGWRFDY

SEQ ID NO: 60 - protein, 30 aa, Human; identical to SEQ ID NO: 24

SEQ ID NO: 61 - protein, 14 aa, Human
WIRQPAGKGLEWIG

SEQ ID NO: 62 - protein, 32 aa, Human
RVTMSVDTSKNQFSLKLSSVTAADTAVYYCAR

SEQ ID NO: 63 - protein, 11 aa, Human
WGQGTLVTVSS

SEQ ID NO: 64 - protein, 181 aa, Human
QSALTQPASVSGSPGQSITISCTGTSSDVGGYNYVSWYQQHPGKAPKLMIYDVSNRPSGVSNRFSGSKSGNTASLTISGLQAEDEADYYCSSYTSSSTLGVFGGGTKLTVLGQPKAAPSVTLFPPSSEELQANKATLVCLISDFYPGAVTVAWKADSSPVKAGVETTTPSKQSNNKYAASS

SEQ ID NO: 65 - protein, 111 aa, Human
QSALTQPASVSGSPGQSITISCTGTSSDVGGYNYVSWYQQHPGKAPKLMIYDVSNRPSGVSNRFSGSKSGNTASLTISGLQAEDEADYYCSSYTSSSTLGVFGGGTKLTVL

SEQ ID NO: 66 - protein, 14 aa, Human
TGTSSDVGGYNYVS

SEQ ID NO: 67 - protein, 7 aa, Human
DVSNRPS

SEQ ID NO: 68 - protein, 11 aa, Human
SSYTSSSTLGV

SEQ ID NO: 69 - protein, 22 aa, Human
QSALTQPASVSGSPGQSITISC

SEQ ID NO: 70 - protein, 15 aa, Human
WYQQHPGKAPKLMIY

SEQ ID NO: 71 - protein, 32 aa, Human
GVSNRFSGSKSGNTASLTISGLQAEDEADYYC

SEQ ID NO: 72 - protein, 10 aa, Human
FGGGTKLTVL

SEQ ID NO: 73 - protein, 184 aa, Human
QVQLQESGPGLVKPSQTLSLTCTVSGGSINSGDYYWSWIRQPPGKGLEWIGYIYFSGSTYYNPSLKSRVTISLDRSKNQFSLKLSSVTAADTAVYYCAREESMITLGGVIVDWGQGTLVTVSSASTKGPSVFPLAPSSKSTSGGTAALGCLVKDYFPEPVTVSWNSGALTSGVHTFPAVLQSSG

SEQ ID NO: 74 - protein, 123 aa, Human
QVQLQESGPGLVKPSQTLSLTCTVSGGSINSGDYYWSWIRQPPGKGLEWIGYIYFSGSTYYNPSLKSRVTISLDRSKNQFSLKLSSVTAADTAVYYCAREESMITLGGVIVDWGQGTLVTVSS

SEQ ID NO: 75 - protein, 7 aa, Human
SGDYYWS

SEQ ID NO: 76 - protein, 16 aa, Human
YIYFSGSTYYNPSLKS

SEQ ID NO: 77 - protein, 13 aa, Human
EESMITLGGVIVD

SEQ ID NO: 78 - protein, 30 aa, Human
QVQLQESGPGLVKPSQTLSLTCTVSGGSIN

SEQ ID NO: 79 - protein, 14 aa, Human
WIRQPPGKGLEWIG

SEQ ID NO: 80 - protein, 32 aa, Human
RVTISLDRSKNQFSLKLSSVTAADTAVYYCAR

SEQ ID NO: 81 - protein, 11 aa, Human
WGQGTLVTVSS

SEQ ID NO: 82 - protein, 192 aa, Human
DIVMTQTPLSSPVTLGQPASISCRSSQSLVHSDGDTYLSWLQQRPGQPPRLLIYKISNRFSGVPDRFSGSGAGTDFTLKISRVEAEDVGVYYCMQATQFPLTFGGGTKVEIKRTVAAPSVFIFPPSDEQLKSGTASVVCLLNNFYPREAKVQWKVDNALQSGNSQESVTEQDSKDSTYSLSSTLTLSKADYE

SEQ ID NO: 83 - protein, 112 aa, Human
DIVMTQTPLSSPVTLGQPASISCRSSQSLVHSDGDTYLSWLQQRPGQPPRLLIYKISNRFSGVPDRFSGSGAGTDFTLKISRVEAEDVGVYYCMQATQFPLTFGGGTKVEIK

SEQ ID NO: 84 - protein, 16 aa, Human
RSSQSLVHSDGDTYLS

SEQ ID NO: 85 - protein, 7 aa, Human
KISNRFS

SEQ ID NO: 86 - protein, 9 aa, Human
MQATQFPLT

SEQ ID NO: 87 - protein, 23 aa, Human
DIVMTQTPLSSPVTLGQPASISC

SEQ ID NO: 88 - protein, 15 aa, Human
WLQQRPGQPPRLLIY

SEQ ID NO: 89 - protein, 32 aa, Human
GVPDRFSGSGAGTDFTLKISRVEAEDVGVYYC

SEQ ID NO: 90 - protein, 10 aa, Human
FGGGTKVEIK

SEQ ID NO: 91 - protein, 182 aa, Human
QVQLQESGPGLVKPSETLSLTCTVSGGSISSHYWSWIRQPPGKGLEQIGYMYYSGSTNYNPSLKSRVIISVDTSKNQFSLKLSSVTAADTAVYYCAGRDQLLYGADGFDIWGQGTMVTVSSASTKGPSVFPLAPSSKSTSGGTAALGCLVKDYFPEPVTVSWNSGALTSGVHTFPAVLQSSG

SEQ ID NO: 92 - protein, 121 aa, Human
QVQLQESGPGLVKPSETLSLTCTVSGGSISSHYWSWIRQPPGKGLEQIGYMYYSGSTNYNPSLKSRVIISVDTSKNQFSLKLSSVTAADTAVYYCAGRDQLLYGADGFDIWGQGTMVTVSS

SEQ ID NO: 93 - protein, 5 aa, Human
SHYWS

SEQ ID NO: 94 - protein, 16 aa, Human
YMYYSGSTNYNPSLKS

SEQ ID NO: 95 - protein, 13 aa, Human
RDQLLYGADGFDI

SEQ ID NO: 96 - protein, 30 aa, Human; identical to SEQ ID NO: 24

SEQ ID NO: 97 - protein, 14 aa, Human
WIRQPPGKGLEQIG

SEQ ID NO: 98 - protein, 32 aa, Human
RVIISVDTSKNQFSLKLSSVTAADTAVYYCAG

SEQ ID NO: 99 - protein, 11 aa, Human
WGQGTMVTVSS

SEQ ID NO: 100 - protein, 181 aa, Human
QSALTQPPSASGSPGQSVTISCTGTSSDVGGYNYVSWYQQHPGKAPKLMIYEVSKRPSGVPDRYSGSKSGNTASLTVSGLQAEDEADYYCSSYAGSSNHVIFGGGTKLTVLGQPKAAPSVTLFPPSSEELQANKATLVCLISDFYPGAVTVAWKADSSPVKAGVETTTPSKQSNNKYAASS

SEQ ID NO: 101 - protein, 111 aa, Human
QSALTQPPSASGSPGQSVTISCTGTSSDVGGYNYVSWYQQHPGKAPKLMIYEVSKRPSGVPDRYSGSKSGNTASLTVSGLQAEDEADYYCSSYAGSSNHVIFGGGTKLTVL

SEQ ID NO: 102 - protein, 14 aa, Human
TGTSSDVGGYNYVS

SEQ ID NO: 103 - protein, 7 aa, Human
EVSKRPS

SEQ ID NO: 104 - protein, 11 aa, Human
SSYAGSSNHVI

SEQ ID NO: 105 - protein, 22 aa, Human
QSALTQPPSASGSPGQSVTISC

SEQ ID NO: 106 - protein, 15 aa, Human
WYQQHPGKAPKLMIY

SEQ ID NO: 107 - protein, 32 aa, Human
GVPDRYSGSKSGNTASLTVSGLQAEDEADYYC

SEQ ID NO: 108 - protein, 10 aa, Human
FGGGTKLTVL

SEQ ID NO: 109 - protein, 184 aa, Human
EVQLVESGGGLVQPGRSLRLSCAASGFTFGDYAMYWVRQPPGKGLEWVSGISWNRGTIGYADSVKGRFTISRDNAKNSLYLQMNSLTPEDTALYYCAKDMLPASRFFYYMDVWGKGTTVIVSSASTKGPSVFPLAPSSKSTSGGTAALGCLVKDYFPEPVTVSWNSGALTSGVHTFPAVLQSSG

SEQ ID NO: 110 - protein, 123 aa, Human
EVQLVESGGGLVQPGRSLRLSCAASGFTFGDYAMYWVRQPPGKGLEWVSGISWNRGTIGYADSVKGRFTISRDNAKNSLYLQMNSLTPEDTALYYCAKDMLPASRFFYYMDVWGKGTTVIVSS

SEQ ID NO: 111 - protein, 5 aa, Human
DYAMY

SEQ ID NO: 112 - protein, 17 aa, Human
GISWNRGTIGYADSVKG

SEQ ID NO: 113 - protein, 14 aa, Human
DMLPASRFFYYMDV

SEQ ID NO: 114 - protein, 30 aa, Human
EVQLVESGGGLVQPGRSLRLSCAASGFTFG

SEQ ID NO: 115 - protein, 14 aa, Human
WVRQPPGKGLEWVS

SEQ ID NO: 116 - protein, 32 aa, Human
RFTISRDNAKNSLYLQMNSLTPEDTALYYCAK

SEQ ID NO: 117 - protein, 11 aa, Human
WGKGTTVIVSS

SEQ ID NO: 118 - protein, 181 aa, Human
QSALTQPASVSGSPGQSITISCTGTSSDVGGYNYVSWYQQHPGKAPKLMIYDVSNRPSGVSNRFSGSKSGNTASLTISGLQAEDEADYYCSSYTSSSTLGVFGTGTKVTVLGQPKANPTVTLFPPSSEELQANKATLVCLISDFYPGAVTVAWKADGSPVKAGVETTKPSKQSNNKYAASS

SEQ ID NO: 119 - protein, 111 aa, Human
QSALTQPASVSGSPGQSITISCTGTSSDVGGYNYVSWYQQHPGKAPKLMIYDVSNRPSGVSNRFSGSKSGNTASLTISGLQAEDEADYYCSSYTSSSTLGVFGTGTKVTVL

SEQ ID NO: 120 - protein, 14 aa, Human
TGTSSDVGGYNYVS

SEQ ID NO: 121 - protein, 7 aa, Human
DVSNRPS

SEQ ID NO: 122 - protein, 11 aa, Human
SSYTSSSTLGV

SEQ ID NO: 123 - protein, 22 aa, Human
QSALTQPASVSGSPGQSITISC

SEQ ID NO: 124 - protein, 15 aa, Human
WYQQHPGKAPKLMIY

SEQ ID NO: 125 - protein, 32 aa, Human; identical to SEQ ID NO: 71

SEQ ID NO: 126 - protein, 10 aa, Human
FGTGTKVTVL

SEQ ID NO: 127 - protein, 182 aa, Human
QVQLQESGPGLVKPSETLSLTCTVSGGSITSYYWSWIRQPPGKGLEWIEYIHYSGSTNYNPSLKSRVTISVDTSKNQFSLKLSSVTAADTAVYYCARLLKYSRGGCYFDHWGQGTLVTVSSASTKGPSVFPLAPSSKSTSGGTAALGCLVKDYFPEPVTVSWNSGALTSGVHTFPAVLQSSG

SEQ ID NO: 128 - protein, 121 aa, Human
QVQLQESGPGLVKPSETLSLTCTVSGGSITSYYWSWIRQPPGKGLEWIEYIHYSGSTNYNPSLKSRVTISVDTSKNQFSLKLSSVTAADTAVYYCARLLKYSRGGCYFDHWGQGTLVTVSS

SEQ ID NO: 129 - protein, 5 aa, Human
SYYWS

SEQ ID NO: 130 - protein, 16 aa, Human
YIHYSGSTNYNPSLKS

SEQ ID NO: 131 - protein, 13 aa, Human
LLKYSRGGCYFDH

SEQ ID NO: 132 - protein, 30 aa, Human
QVQLQESGPGLVKPSETLSLTCTVSGGSIT

SEQ ID NO: 133 - protein, 14 aa, Human
WIRQPPGKGLEWIE

SEQ ID NO: 134 - protein, 32 aa, Human
RVTISVDTSKNQFSLKLSSVTAADTAVYYCAR

SEQ ID NO: 135 - protein, 11 aa, Human
WGQGTLVTVSS

SEQ ID NO: 136 - protein, 192 aa, Human
QSVLTQPPSASGTPGQRVTISCSGSSSNIGGNPVNWYQQLPGTAPKLLIYSNNQRPSGVPDRFSGSKSGTSASLAISGLQSEDEADYYCAAWDDSLKGPVFGGGTKLTVLGQPKAAPSVTLFPPSSEELQANKATLVCLISDFYPGAVTVAWKADSSPVKAGVETTTPSKQSNNKYAASSYLSLTPEQWKSH

SEQ ID NO: 137 - protein, 110 aa, Human
QSVLTQPPSASGTPGQRVTISCSGSSSNIGGNPVNWYQQLPGTAPKLLIYSNNQRPSGVPDRFSGSKSGTSASLAISGLQSEDEADYYCAAWDDSLKGPVFGGGTKLTVL

SEQ ID NO: 138 - protein, 13 aa, Human
SGSSSNIGGNPVN

SEQ ID NO: 139 - protein, 7 aa, Human
SNNQRPS

SEQ ID NO: 140 - protein, 11 aa, Human
AAWDDSLKGPV

SEQ ID NO: 141 - protein, 22 aa, Human
QSVLTQPPSASGTPGQRVTISC

SEQ ID NO: 142 - protein, 15 aa, Human
WYQQLPGTAPKLLIY

SEQ ID NO: 143 - protein, 32 aa, Human
GVPDRFSGSKSGTSASLAISGLQSEDEADYYC

SEQ ID NO: 144 - protein, 10 aa, Human
FGGGTKLTVL

SEQ ID NO: 145 - protein, 177 aa, Human
EVQLVESGGGLVQPGGSLRLSCAASGFTLSSYSMNWVRQAPGKGLEWVSYISSSSSTIYYADSVKGRFTISKDNAKNSLYLQMNSLRAEDTAVYYCAVGRGYFVYWGQGTLVTVSSASTKGPSVFPLAPSSKSTSGGTAALGCLVKDYFPEPVTVSWNSGALTSGVHTFPAVLQSSG

SEQ ID NO: 146 - protein, 116 aa, Human
EVQLVESGGGLVQPGGSLRLSCAASGFTLSSYSMNWVRQAPGKGLEWVSYISSSSSTIYYADSVKGRFTISKDNAKNSLYLQMNSLRAEDTAVYYCAVGRGYFVYWGQGTLVTVSS

SEQ ID NO: 147 - protein, 5 aa, Human
SYSMN

SEQ ID NO: 148 - protein, 17 aa, Human
YISSSSSTIYYADSVKG

SEQ ID NO: 149 - protein, 7 aa, Human
GRGYFVY

SEQ ID NO: 150 - protein, 30 aa, Human
EVQLVESGGGLVQPGGSLRLSCAASGFTLS

SEQ ID NO: 151 - protein, 14 aa, Human
WVRQAPGKGLEWVS

SEQ ID NO: 152 - protein, 32 aa, Human
RFTISKDNAKNSLYLQMNSLRAEDTAVYYCAV

SEQ ID NO: 153 - protein, 11 aa, Human
WGQGTLVTVSS

SEQ ID NO: 154 - protein, 187 aa, Human
EIVLTQSPGTLSLSPGERATLSCRASQSVSSGYLAWYQQKPGQAPRLLIFGASSRATGIPDRFSGSGSGTDFTLTINRLEPEDFAVYYCQQYGSSRTFGQGTKVEIKRTVAAPSVFIFPPSDEQLKSGTASVVCLLNNFYPREAKVQWKVDNALQSGNSQESVTEQDSKDSTYSLSSTLTLSKADYE

SEQ ID NO: 155 - protein, 107 aa, Human
EIVLTQSPGTLSLSPGERATLSCRASQSVSSGYLAWYQQKPGQAPRLLIFGASSRATGIPDRFSGSGSGTDFTLTINRLEPEDFAVYYCQQYGSSRTFGQGTKVEIK

SEQ ID NO: 156 - protein, 12 aa, Human
RASQSVSSGYLA

SEQ ID NO: 157 - protein, 7 aa, Human
GASSRAT

SEQ ID NO: 158 - protein, 8 aa, Human
QQYGSSRT

SEQ ID NO: 159 - protein, 23 aa, Human
EIVLTQSPGTLSLSPGERATLSC

SEQ ID NO: 160 - protein, 15 aa, Human
WYQQKPGQAPRLLIF

SEQ ID NO: 161 - protein, 32 aa, Human
GIPDRFSGSGSGTDFTLTINRLEPEDFAVYYC

SEQ ID NO: 162 - protein, 10 aa, Human
FGQGTKVEIK

SEQ ID NO: 163 - protein, 189 aa, Human
QVQLVESGGGVVQPGRSLRLSCAASGFTFSSYGMHWVRQAPGKGLEWVAVIWYDGSNKYYADSVKGRFTISRDNSKNTLYLQMNSLRAEDTAVYYCARIEGYSYGDVRVYYYYGMDVWGQGTTVTVSSASTKGPSVFPLAPSSKSTSGGTAALGCLVKDYFPEPVTVSWNSGALTSGVHTFPAVLQSSG

SEQ ID NO: 164 - protein, 128 aa, Human
QVQLVESGGGVVQPGRSLRLSCAASGFTFSSYGMHWVRQAPGKGLEWVAVIWYDGSNKYYADSVKGRFTISRDNSKNTLYLQMNSLRAEDTAVYYCARIEGYSYGDVRVYYYYGMDVWGQGTTVTVSS

SEQ ID NO: 165 - protein, 5 aa, Human
SYGMH

SEQ ID NO: 166 - protein, 17 aa, Human
VIWYDGSNKYYADSVKG

SEQ ID NO: 167 - protein, 19 aa, Human
IEGYSYGDVRVYYYYGMDV

SEQ ID NO: 168 - protein, 30 aa, Human
QVQLVESGGGVVQPGRSLRLSCAASGFTFS

SEQ ID NO: 169 - protein, 14 aa, Human
WVRQAPGKGLEWVA

SEQ ID NO: 170 - protein, 32 aa, Human
RFTISRDNSKNTLYLQMNSLRAEDTAVYYCAR

SEQ ID NO: 171 - protein, 11 aa, Human
WGQGTTVTVSS

SEQ ID NO: 172 - protein, 180 aa, Human
QSALTQPASVSGSPGQSITISCTGTTSDVGGYDYVSWYQQHPGKAPKLILSEVSNRPSGVSNRFSGSKSGNTASLTISGLQAEDEADYYCSSYPSSSTLVFGTGTKVTVLGQPKANPTVTLFPPSSEELQANKATLVCLISDFYPGAVTVAWKADGSPVKAGVETTTPSKQSNNKYAASS

SEQ ID NO: 173 - protein, 110 aa, Human
QSALTQPASVSGSPGQSITISCTGTTSDVGGYDYVSWYQQHPGKAPKLILSEVSNRPSGVSNRFSGSKSGNTASLTISGLQAEDEADYYCSSYPSSSTLVFGTGTKVTVL

SEQ ID NO: 174 - protein, 14 aa, Human
TGTTSDVGGYDYVS

SEQ ID NO: 175 - protein, 7 aa, Human
EVSNRPS

SEQ ID NO: 176 - protein, 10 aa, Human
SSYPSSSTLV

SEQ ID NO: 177 - protein, 22 aa, Human
QSALTQPASVSGSPGQSITISC

SEQ ID NO: 178 - protein, 15 aa, Human
WYQQHPGKAPKLILS

SEQ ID NO: 179 - protein, 32 aa, Human; identical to SEQ ID NO: 71

SEQ ID NO: 180 - protein, 10 aa, Human
FGTGTKVTVL

SEQ ID NO: 181 - protein, 191 aa, Human
QVHLVQSGAEVKKPGSSVKVSCKASGGTFSSCAISWVRQAPGQGLEWMGRIIPILGIANYAQKFQGRVTITADKSTSTAYMELSSLRSEDTAVYYCARGWEFGSGSYYRTDYYYYAMDVWGQGTTVTVSSASTKGPSVFPLAPCSRSTSGGTAALGCLVKDYFPEPVTVSWNSGALTSGVHTFPAVLQSSG

SEQ ID NO: 182 - protein, 130 aa, Human
QVHLVQSGAEVKKPGSSVKVSCKASGGTFSSCAISWVRQAPGQGLEWMGRIIPILGIANYAQKFQGRVTITADKSTSTAYMELSSLRSEDTAVYYCARGWEFGSGSYYRTDYYYYAMDVWGQGTTVTVSS

SEQ ID NO: 183 - protein, 5 aa, Human
SCAIS

SEQ ID NO: 184 - protein, 17 aa, Human
RIIPILGIANYAQKFQG

SEQ ID NO: 185 - protein, 21 aa, Human
GWEFGSGSYYRTDYYYYAMDV

SEQ ID NO: 186 - protein, 30 aa, Human
QVHLVQSGAEVKKPGSSVKVSCKASGGTFS

SEQ ID NO: 187 - protein, 14 aa, Human
WVRQAPGQGLEWMG

SEQ ID NO: 188 - protein, 32 aa, Human
RVTITADKSTSTAYMELSSLRSEDTAVYYCAR

SEQ ID NO: 189 - protein, 11 aa, Human
WGQGTTVTVSS

SEQ ID NO: 190 - protein, 180 aa, Human
QSALTQPASVSGSPGQSITISCTGTSSDVGGYNYVSWYQQHPGKAPKLMIYEVTNRPSGVSNRFSGSRSGNTASLTISGLQAEDEADYYCSSYTSSSLYVFGTGTKVAVLGQPKANPTVTLFPPSSEELQANKATLVCLISDFYPGAVTVAWKADSSPVKAGVETTKPSKQSNNKYAASS

SEQ ID NO: 191 - protein, 110 aa, Human
QSALTQPASVSGSPGQSITISCTGTSSDVGGYNYVSWYQQHPGKAPKLMIYEVTNRPSGVSNRFSGSRSGNTASLTISGLQAEDEADYYCSSYTSSSLYVFGTGTKVAVL

SEQ ID NO: 192 - protein, 14 aa, Human
TGTSSDVGGYNYVS

SEQ ID NO: 193 - protein, 7 aa, Human
EVTNRPS

SEQ ID NO: 194 - protein, 10 aa, Human
SSYTSSSLYV

SEQ ID NO: 195 - protein, 22 aa, Human
QSALTQPASVSGSPGQSITISC

SEQ ID NO: 196 - protein, 15 aa, Human
WYQQHPGKAPKLMIY

SEQ ID NO: 197 - protein, 32 aa, Human
GVSNRFSGSRSGNTASLTISGLQAEDEADYYC

SEQ ID NO: 198 - protein, 10 aa, Human
FGTGTKVAVL

SEQ ID NO: 199 - protein, 187 aa, Human
EVQLVQSGAEVKKPGESLRISCKGSGYSFSSYWISWVRQMPGKGLEWMGRIDPSDSNTNYSPSFQGHVTISADKSISTAYLQWSSLKASDTAMYYCARLSVRVWFGELPHYGMDVWGQGTTVTVSSASTKGPSVFPLAPSSKSTSGGTAALGCLVKDYFPEPVTVSWNSGALTSGVHTFPAVLQSSG

SEQ ID NO: 200 - protein, 126 aa, Human
EVQLVQSGAEVKKPGESLRISCKGSGYSFSSYWISWVRQMPGKGLEWMGRIDPSDSNTNYSPSFQGHVTISADKSISTAYLQWSSLKASDTAMYYCARLSVRVWFGELPHYGMDVWGQGTTVTVSS

SEQ ID NO: 201 - protein, 5 aa, Human
SYWIS

SEQ ID NO: 202 - protein, 17 aa, Human
RIDPSDSNTNYSPSFQG

SEQ ID NO: 203 - protein, 17 aa, Human
LSVRVWFGELPHYGMDV

SEQ ID NO: 204 - protein, 30 aa, Human
EVQLVQSGAEVKKPGESLRISCKGSGYSFS

SEQ ID NO: 205 - protein, 14 aa, Human
WVRQMPGKGLEWMG

SEQ ID NO: 206 - protein, 32 aa, Human
HVTISADKSISTAYLQWSSLKASDTAMYYCAR

SEQ ID NO: 207 - protein, 11 aa, Human
WGQGTTVTVSS

SEQ ID NO: 208 - protein, 152 aa, Human
EIVLTQSPATLSLSPGERATLSCRASQSVSSYLAWYQQKPGQAPRLLIYDASNRASGIPARFSGSGSGTDFTLTISSLEPEDFAVYYCQQRRNWPLTFGGGTKVETKRTVAAPSVFIFPPSDEQLKSGTASVVCLLNNFYPREAKVQWKVDN

SEQ ID NO: 209 - protein, 107 aa, Human
EIVLTQSPATLSLSPGERATLSCRASQSVSSYLAWYQQKPGQAPRLLIYDASNRASGIPARFSGSGSGTDFTLTISSLEPEDFAVYYCQQRRNWPLTFGGGTKVETK

SEQ ID NO: 210 - protein, 11 aa, Human
RASQSVSSYLA

SEQ ID NO: 211 - protein, 7 aa, Human
DASNRAS

SEQ ID NO: 212 - protein, 9 aa, Human
QQRRNWPLT

SEQ ID NO: 213 - protein, 23 aa, Human
EIVLTQSPATLSLSPGERATLSC

SEQ ID NO: 214 - protein, 15 aa, Human
WYQQKPGQAPRLLIY

SEQ ID NO: 215 - protein, 32 aa, Human
GIPARFSGSGSGTDFTLTISSLEPEDFAVYYC

SEQ ID NO: 216 - protein, 10 aa, Human
FGGGTKVETK

SEQ ID NO: 217 - protein, 188 aa, Human
QVQLVQSGAEVKKPGASVKVSCKASGYTFTGYYMHWVRQAPGQGLEWMGWINPNSGDTNYAQKFQGWVTMTRDTSLSTAYMELSRLKSDDTAVYYCARVGVGEYSGRHYYYYGMDVWGQGTTVTVSSASTKGPSVFPLAPSSKSTSGGTAALGCLVKDYFPEPVTVSWNSGALTSGVHTFPAVLQSSG

SEQ ID NO: 218 - protein, 127 aa, Human
QVQLVQSGAEVKKPGASVKVSCKASGYTFTGYYMHWVRQAPGQGLEWMGWINPNSGDTNYAQKFQGWVTMTRDTSLSTAYMELSRLKSDDTAVYYCARVGVGEYSGRHYYYYGMDVWGQGTTVTVSS

SEQ ID NO: 219 - protein, 5 aa, Human
GYYMH

SEQ ID NO: 220 - protein, 17 aa, Human
WINPNSGDTNYAQKFQG

SEQ ID NO: 221 - protein, 18 aa, Human
VGVGEYSGRHYYYYGMDV

SEQ ID NO: 222 - protein, 30 aa, Human
QVQLVQSGAEVKKPGASVKVSCKASGYTFT

SEQ ID NO: 223 - protein, 14 aa, Human
WVRQAPGQGLEWMG

SEQ ID NO: 224 - protein, 32 aa, Human
WVTMTRDTSLSTAYMELSRLKSDDTAVYYCAR

SEQ ID NO: 225 - protein, 11 aa, Human
WGQGTTVTVSS

SEQ ID NO: 226 - protein, 152 aa, Human
EIVLTQSPGTLSLSPGERATLSCRASQSISSSYLAWYQQKPGQAPRLLIYGASSRATGIPDRFSGSGSGTDFTLTISRLEPEDFAVYYCQQYGSSLTFGGGTKVEIKRTVAAPSVFIFPPSDEQLKSGTASVVCLLNNFYPREAKVQWKVDN

SEQ ID NO: 227 - protein, 107 aa, Human
EIVLTQSPGTLSLSPGERATLSCRASQSISSSYLAWYQQKPGQAPRLLIYGASSRATGIPDRFSGSGSGTDFTLTISRLEPEDFAVYYCQQYGSSLTFGGGTKVEIK

SEQ ID NO: 228 - protein, 12 aa, Human
RASQSISSSYLA

SEQ ID NO: 229 - protein, 7 aa, Human
GASSRAT

SEQ ID NO: 230 - protein, 8 aa, Human
QQYGSSLT

SEQ ID NO: 231 - protein, 23 aa, Human
EIVLTQSPGTLSLSPGERATLSC

SEQ ID NO: 232 - protein, 15 aa, Human
WYQQKPGQAPRLLIY

SEQ ID NO: 233 - protein, 32 aa, Human
GIPDRFSGSGSGTDFTLTISRLEPEDFAVYYC

SEQ ID NO: 234 - protein, 10 aa, Human
FGGGTKVEIK

SEQ ID NO: 235 - protein, 153 aa, Human
EVQLVESGGGLVQPGRSLRLSCTASGFTFGDYAMSWFRQAPGKGLEWVGFIRSKAYGGTTQHAASVKGRFTISRDDSKSIAYLQMNSLKTEDTAVYHCARDGYDCSGGRCYSHIFDYWGQGTLVTVSSGESSPPPLVHLGRLSLPGSQGQSLV

SEQ ID NO: 236 - protein, 128 aa, Human
EVQLVESGGGLVQPGRSLRLSCTASGFTFGDYAMSWFRQAPGKGLEWVGFIRSKAYGGTTQHAASVKGRFTISRDDSKSIAYLQMNSLKTEDTAVYHCARDGYDCSGGRCYSHIFDYWGQGTLVTVSS

SEQ ID NO: 237 - protein, 5 aa, Human
DYAMS

SEQ ID NO: 238 - protein, 19 aa, Human
FIRSKAYGGTTQHAASVKG

SEQ ID NO: 239 - protein, 17 aa, Human
DGYDCSGGRCYSHIFDY

SEQ ID NO: 240 - protein, 30 aa, Human
EVQLVESGGGLVQPGRSLRLSCTASGFTFG

SEQ ID NO: 241 - protein, 14 aa, Human
WFRQAPGKGLEWVG

SEQ ID NO: 242 - protein, 32 aa, Human
RFTISRDDSKSIAYLQMNSLKTEDTAVYHCAR

SEQ ID NO: 243 - protein, 11 aa, Human
WGQGTLVTVSS

SEQ ID NO: 244 - protein, 151 aa, Human
EIVMTQSPATLSVSPGERATLSCRASQSVSSNLAWYQQKPGQAPRLLIYGASTRATGIPARFSGSGSGTEFTLTISSLQSEDFAVYYCQQYDNWWTFGQGTKVEIKRTVAAPSVFIFPPSDEQLKSGTASVVCLLNNFYPREAKVQWKVDN

SEQ ID NO: 245 - protein, 106 aa, Human
EIVMTQSPATLSVSPGERATLSCRASQSVSSNLAWYQQKPGQAPRLLIYGASTRATGIPARFSGSGSGTEFTLTISSLQSEDFAVYYCQQYDNWWTFGQGTKVEIK

SEQ ID NO: 246 - protein, 11 aa, Human
RASQSVSSNLA

SEQ ID NO: 247 - protein, 7 aa, Human
GASTRAT

SEQ ID NO: 248 - protein, 8 aa, Human
QQYDNWWT

SEQ ID NO: 249 - protein, 23 aa, Human
EIVMTQSPATLSVSPGERATLSC

SEQ ID NO: 250 - protein, 15 aa, Human
WYQQKPGQAPRLLIY

SEQ ID NO: 251 - protein, 32 aa, Human
GIPARFSGSGSGTEFTLTISSLQSEDFAVYYC

SEQ ID NO: 252 - protein, 10 aa, Human
FGQGTKVEIK

SEQ ID NO: 253 - protein, 186 aa, Human
QVQLQESGPGLVKPSGTLSLTCAVSGGSISSINWWSWVRQPPGKGLEWIGEIYHSGNTNYNPSLKSRVTISGDKSKNQFSLKLSSVTAADTAVYYCARGYYDSSPYYEPQGIDYWGQGILVTVSSASTKGPSVFPLAPSSKSTSGGTAALGCLVKDYFPEPVTVSWNSGALTSGVHTFPAVLQSSG

SEQ ID NO: 254 - protein, 125 aa, Human
QVQLQESGPGLVKPSGTLSLTCAVSGGSISSINWWSWVRQPPGKGLEWIGEIYHSGNTNYNPSLKSRVTISGDKSKNQFSLKLSSVTAADTAVYYCARGYYDSSPYYEPQGIDYWGQGILVTVSS

SEQ ID NO: 255 - protein, 6 aa, Human
SINWWS

SEQ ID NO: 256 - protein, 16 aa, Human
EIYHSGNTNYNPSLKS

SEQ ID NO: 257 - protein, 16 aa, Human
GYYDSSPYYEPQGIDY

SEQ ID NO: 258 - protein, 30 aa, Human
QVQLQESGPGLVKPSGTLSLTCAVSGGSIS

SEQ ID NO: 259 - protein, 14 aa, Human
WVRQPPGKGLEWIG

SEQ ID NO: 260 - protein, 32 aa, Human
RVTISGDKSKNQFSLKLSSVTAADTAVYYCAR

SEQ ID NO: 261 - protein, 11 aa, Human
WGQGILVTVSS

SEQ ID NO: 262 - protein, 181 aa, Human
QLVLTQSPSASASLGASVKLTCTLSSGHSSYTIAWHQQQPEKGPRYLMKVNSDGSHTKGDGIPDRFSGSSSGAERYLTISSLQSEDEADYYCQTWGTGIRVFGGGTKLTVLGQPKAAPSVTLFPPSSEELQANKATLVCLISDFYPGAVTVAWKADSSPVKAGVETTTPSKQSNNKYAASS

SEQ ID NO: 263 - protein, 111 aa, Human
QLVLTQSPSASASLGASVKLTCTLSSGHSSYTIAWHQQQPEKGPRYLMKVNSDGSHTKGDGIPDRFSGSSSGAERYLTISSLQSEDEADYYCQTWGTGIRVFGGGTKLTVL

SEQ ID NO: 264 - protein, 12 aa, Human
TLSSGHSSYTIA

SEQ ID NO: 265 - protein, 11 aa, Human
VNSDGSHTKGD

SEQ ID NO: 266 - protein, 9 aa, Human
QTWGTGIRV

SEQ ID NO: 267 - protein, 22 aa, Human
QLVLTQSPSASASLGASVKLTC

SEQ ID NO: 268 - protein, 15 aa, Human
WHQQQPEKGPRYLMK

SEQ ID NO: 269 - protein, 32 aa, Human
GIPDRFSGSSSGAERYLTISSLQSEDEADYYC

SEQ ID NO: 270 - protein, 10 aa, Human
FGGGTKLTVL

SEQ ID NO: 271 - protein, 143 aa, Human
QVQLVQSGAEVKKPGASVKVSCKASGYTFTSYFIHWVRQAPGQGLEWMGIINPSGGSTSYAQKFQGRVTMTRDTSTSTVYMELSSLRSEDTAVYYCARHTTPTRYFDYWGQGTLVTVSSGSASAPTLFPLVSCENSPSDTSSV

SEQ ID NO: 272 - protein, 119 aa, Human
QVQLVQSGAEVKKPGASVKVSCKASGYTFTSYFIHWVRQAPGQGLEWMGIINPSGGSTSYAQKFQGRVTMTRDTSTSTVYMELSSLRSEDTAVYYCARHTTPTRYFDYWGQGTLVTVSS

SEQ ID NO: 273 - protein, 5 aa, Human
SYFIH

SEQ ID NO: 274 - protein, 17 aa, Human
IINPSGGSTSYAQKFQG

SEQ ID NO: 275 - protein, 10 aa, Human
HTTPTRYFDY

SEQ ID NO: 276 - protein, 30 aa, Human; identical to SEQ ID NO: 222

SEQ ID NO: 277 - protein, 14 aa, Human
WVRQAPGQGLEWMG

SEQ ID NO: 278 - protein, 32 aa, Human
RVTMTRDTSTSTVYMELSSLRSEDTAVYYCAR

SEQ ID NO: 279 - protein, 11 aa, Human
WGQGTLVTVSS

SEQ ID NO: 280 - protein, 153 aa, Human
EIVLTQSPGTLSLSPGERATLSCRASQSVTSSYLAWYQQRRGQAPRLLIYGASSRATGIPDRFSGSGSGTDFTLTISRLEPEDFAVYYCQQYGSSPLTFGGGTKVEIKRTVAAPSVFIFPPSDEQLKSGTASVVCLLNNFYPREAKVQWKVDN

SEQ ID NO: 281 - protein, 108 aa, Human
EIVLTQSPGTLSLSPGERATLSCRASQSVTSSYLAWYQQRRGQAPRLLIYGASSRATGIPDRFSGSGSGTDFTLTISRLEPEDFAVYYCQQYGSSPLTFGGGTKVEIK

SEQ ID NO: 282 - protein, 12 aa, Human
RASQSVTSSYLA

SEQ ID NO: 283 - protein, 7 aa, Human
GASSRAT

SEQ ID NO: 284 - protein, 9 aa, Human
QQYGSSPLT

SEQ ID NO: 285 - protein, 23 aa, Human
EIVLTQSPGTLSLSPGERATLSC

SEQ ID NO: 286 - protein, 15 aa, Human
WYQQRRGQAPRLLIY

SEQ ID NO: 287 - protein, 32 aa, Human; identical to SEQ ID NO: 233

SEQ ID NO: 288 - protein, 10 aa, Human
FGGGTKVEIK

SEQ ID NO: 289 - protein, 129 aa, Human
QLQLQESGPGLVKPSETLSLTCTVSGGSISSSSYYWGWIRQPPGKGLEWIGSIYYSGSTYYNPSLKSRVTISVDTSKNQFSLKLSSVTAADTAVYYCARKPRSDYGYFDLWGRGTLVTVSSASTKGPSV

SEQ ID NO: 290 - protein, 121 aa, Human
QLQLQESGPGLVKPSETLSLTCTVSGGSISSSSYYWGWIRQPPGKGLEWIGSIYYSGSTYYNPSLKSRVTISVDTSKNQFSLKLSSVTAADTAVYYCARKPRSDYGYFDLWGRGTLVTVSS

SEQ ID NO: 291 - protein, 7 aa, Human
SSSYYWG

SEQ ID NO: 292 - protein, 16 aa, Human
SIYYSGSTYYNPSLKS

SEQ ID NO: 293 - protein, 11 aa, Human
KPRSDYGYFDL

SEQ ID NO: 294 - protein, 30 aa, Human
QLQLQESGPGLVKPSETLSLTCTVSGGSIS

SEQ ID NO: 295 - protein, 14 aa, Human
WIRQPPGKGLEWIG

SEQ ID NO: 296 - protein, 32 aa, Human; identical to SEQ ID NO: 134

SEQ ID NO: 297 - protein, 11 aa, Human
WGRGTLVTVSS

SEQ ID NO: 298 - protein, 153 aa, Human
DIQMTQSPSSLSASVGDRVTITCRASQSISSYLNWYQQKPGKAPKLLIYAASSLQSGVPSRFSGSGSGTDFTLTISSLQPEDFATYYCQQSYSTPQLTFGGGTKVEIKRTVAAPSVFIFPPSDEQLKSGTASVVCLLNNFYPREAKVQWKVDN

SEQ ID NO: 299 - protein, 108 aa, Human
DIQMTQSPSSLSASVGDRVTITCRASQSISSYLNWYQQKPGKAPKLLIYAASSLQSGVPSRFSGSGSGTDFTLTISSLQPEDFATYYCQQSYSTPQLTFGGGTKVEIK

SEQ ID NO: 300 - protein, 11 aa, Human
RASQSISSYLN

SEQ ID NO: 301 - protein, 7 aa, Human
AASSLQS

SEQ ID NO: 302 - protein, 10 aa, Human
QQSYSTPQLT

SEQ ID NO: 303 - protein, 23 aa, Human
DIQMTQSPSSLSASVGDRVTITC

SEQ ID NO: 304 - protein, 15 aa, Human
WYQQKPGKAPKLLIY

SEQ ID NO: 305 - protein, 32 aa, Human
GVPSRFSGSGSGTDFTLTISSLQPEDFATYYC

SEQ ID NO: 306 - protein, 10 aa, Human
FGGGTKVEIK

SEQ ID NO: 307 - protein, 191 aa, Human
EVQLVESGGGLVKPGRSLRLSCTASGFTFGDYAMSWFRQAPGKGLEWVGFTRRKAYGGTTEYAASVKGRFTISRDDSKSIAYLQMNSLKTEDTAVYYCTRIKVGRFDLTDSGSYRYFDYWGQGTLVTVSSASTKGPSVFPLAPSSKSTSGGTAALGCLVKDYFPEPVTVSWNSGALTSGVHTFPAVLQSSG

SEQ ID NO: 308 - protein, 130 aa, Human
EVQLVESGGGLVKPGRSLRLSCTASGFTFGDYAMSWFRQAPGKGLEWVGFTRRKAYGGTTEYAASVKGRFTISRDDSKSIAYLQMNSLKTEDTAVYYCTRIKVGRFDLTDSGSYRYFDYWGQGTLVTVSS

SEQ ID NO: 309 - protein, 5 aa, Human
DYAMS

SEQ ID NO: 310 - protein, 19 aa, Human
FTRRKAYGGTTEYAASVKG

SEQ ID NO: 311 - protein, 19 aa, Human
IKVGRFDLTDSGSYRYFDY

SEQ ID NO: 312 - protein, 30 aa, Human
EVQLVESGGGLVKPGRSLRLSCTASGFTFG

SEQ ID NO: 313 - protein, 14 aa, Human
WFRQAPGKGLEWVG

SEQ ID NO: 314 - protein, 32 aa, Human
RFTISRDDSKSIAYLQMNSLKTEDTAVYYCTR

SEQ ID NO: 315 - protein, 11 aa, Human
WGQGTLVTVSS

SEQ ID NO: 316 - protein, 157 aa, Human
DIVMTQSPLSLPVTPGEPASISCRSSQSLLHSNGYNYLDWYLQKPGQSPQLLIYLGSNRASGVPDRFSGSGSGTDFTLKISRVEAEDVGVYYCMQPLQTPWTFGQGTKVEIKRTVAAPSVFIFPPSDEQLKSGTASVVCLLNNFYPREAKVQWKVDN

SEQ ID NO: 317 - protein, 112 aa, Human
DIVMTQSPLSLPVTPGEPASISCRSSQSLLHSNGYNYLDWYLQKPGQSPQLLIYLGSNRASGVPDRFSGSGSGTDFTLKISRVEAEDVGVYYCMQPLQTPWTFGQGTKVEIK

SEQ ID NO: 318 - protein, 16 aa, Human
RSSQSLLHSNGYNYLD

SEQ ID NO: 319 - protein, 7 aa, Human
LGSNRAS

SEQ ID NO: 320 - protein, 9 aa, Human
MQPLQTPWT

SEQ ID NO: 321 - protein, 23 aa, Human
DIVMTQSPLSLPVTPGEPASISC

SEQ ID NO: 322 - protein, 15 aa, Human
WYLQKPGQSPQLLIY

SEQ ID NO: 323 - protein, 32 aa, Human
GVPDRFSGSGSGTDFTLKISRVEAEDVGVYYC

SEQ ID NO: 324 - protein, 10 aa, Human
FGQGTKVEIK

SEQ ID NO: 325 - protein, 152 aa, Human
EVQLVESGGGLVQPGGSLRLSCAASGFTLSSYWMSWVRQAPGKGLEWVANIKQDGSEKYYVDSVKGRFTISRDNAKNSLYLQMNSLRAEDTAVYYCARDLTATWFDPWGQGTLVTVSSAPTKAPDVFPIISGCRHPKDNSPVVLACLITGYH

SEQ ID NO: 326 - protein, 118 aa, Human
EVQLVESGGGLVQPGGSLRLSCAASGFTLSSYWMSWVRQAPGKGLEWVANIKQDGSEKYYVDSVKGRFTISRDNAKNSLYLQMNSLRAEDTAVYYCARDLTATWFDPWGQGTLVTVSS

SEQ ID NO: 327 - protein, 5 aa, Human
SYWMS

SEQ ID NO: 328 - protein, 17 aa, Human
NIKQDGSEKYYVDSVKG

SEQ ID NO: 329 - protein, 9 aa, Human
DLTATWFDP

SEQ ID NO: 330 - protein, 30 aa, Human; identical to SEQ ID NO: 150

SEQ ID NO: 331 - protein, 14 aa, Human
WVRQAPGKGLEWVA

SEQ ID NO: 332 - protein, 32 aa, Human
RFTISRDNAKNSLYLQMNSLRAEDTAVYYCAR

SEQ ID NO: 333 - protein, 11 aa, Human
WGQGTLVTVSS

SEQ ID NO: 334 - protein, 180 aa, Human
QTVVTQEPSFSVSPGGTVTLTCGLSSGSVSTSYYPSWYQQTPGQAPRTLIYSTNKRSSGVPDRFSGSILGNKAALTITGAQADDESDYYCVLYMGSGMSVFGGGTKLTVLGQPKAAPSVTLFPPSSEELQANKATLVCLISDFYPGAVTVAWKADSSPVKAGVETTTPSKQSNNKYAASS

SEQ ID NO: 335 - protein, 110 aa, Human
QTVVTQEPSFSVSPGGTVTLTCGLSSGSVSTSYYPSWYQQTPGQAPRTLIYSTNKRSSGVPDRFSGSILGNKAALTITGAQADDESDYYCVLYMGSGMSVFGGGTKLTVL

SEQ ID NO: 336 - protein, 14 aa, Human
GLSSGSVSTSYYPS

SEQ ID NO: 337 - protein, 7 aa, Human
STNKRSS

SEQ ID NO: 338 - protein, 10 aa, Human
VLYMGSGMSV

SEQ ID NO: 339 - protein, 22 aa, Human
QTVVTQEPSFSVSPGGTVTLTC

SEQ ID NO: 340 - protein, 15 aa, Human
WYQQTPGQAPRTLIY

SEQ ID NO: 341 - protein, 32 aa, Human
GVPDRFSGSILGNKAALTITGAQADDESDYYC

SEQ ID NO: 342 - protein, 10 aa, Human
FGGGTKLTVL

SEQ ID NO: 343 - protein, 186 aa, Human
QVQLVQSGAEVKKPGASVKVSCKASGYTFTSYALHWVRQAPGQRLEWMGWINAGNGNTKYSQRFQGRVTIIRDTSASTTYMELSSLRSEDTAVYYCARGYARAGVITIKESLHHWGQGTLVTVSSASTKGPSVFPLAPSSKSTSGGTAALGCLVKDYFPEPVTVSWNSGALTSGVHTFPAVLQSSG

SEQ ID NO: 344 - protein, 125 aa, Human
QVQLVQSGAEVKKPGASVKVSCKASGYTFTSYALHWVRQAPGQRLEWMGWINAGNGNTKYSQRFQGRVTIIRDTSASTTYMELSSLRSEDTAVYYCARGYARAGVITIKESLHHWGQGTLVTVSS

SEQ ID NO: 345 - protein, 5 aa, Human
SYALH

SEQ ID NO: 346 - protein, 17 aa, Human
WINAGNGNTKYSQRFQG

SEQ ID NO: 347 - protein, 16 aa, Human
GYARAGVITIKESLHH

SEQ ID NO: 348 - protein, 30 aa, Human; identical to SEQ ID NO: 222

SEQ ID NO: 349 - protein, 14 aa, Human
WVRQAPGQRLEWMG

SEQ ID NO: 350 - protein, 32 aa, Human
RVTIIRDTSASTTYMELSSLRSEDTAVYYCAR

SEQ ID NO: 351 - protein, 11 aa, Human
WGQGTLVTVSS

SEQ ID NO: 352 - protein, 159 aa, Human
DIVMTQSPDSLAVSLGERATINCKSSQSVLYSSNNKNYLAWYQQKPGQPPKLLIYWASTRESGVPDRFSGSGSGTDFTLTISSLQAEDVAVYYCQQYYSTPPLTFGGGTKVEIKRTVAAPSVFIFPPSDEQLKSGTASVVCLLNNFYPREAKVQWKVDN

SEQ ID NO: 353 - protein, 114 aa, Human
DIVMTQSPDSLAVSLGERATINCKSSQSVLYSSNNKNYLAWYQQKPGQPPKLLIYWASTRESGVPDRFSGSGSGTDFTLTISSLQAEDVAVYYCQQYYSTPPLTFGGGTKVEIK

SEQ ID NO: 354 - protein, 17 aa, Human
KSSQSVLYSSNNKNYLA

SEQ ID NO: 355 - protein, 7 aa, Human
WASTRES

SEQ ID NO: 356 - protein, 10 aa, Human
QQYYSTPPLT

SEQ ID NO: 357 - protein, 23 aa, Human
DIVMTQSPDSLAVSLGERATINC

SEQ ID NO: 358 - protein, 15 aa, Human
WYQQKPGQPPKLLIY

SEQ ID NO: 359 - protein, 32 aa, Human
GVPDRFSGSGSGTDFTLTISSLQAEDVAVYYC

SEQ ID NO: 360 - protein, 10 aa, Human
FGGGTKVEIK

SEQ ID NO: 361 - protein, 183 aa, Human
QVQLQESGPGLVKPSETLSLTCTVSGGSISSSYWSWIRQPPGKGLEWIGYIYYSGNTNYNPSLKSRVTLSIDTSKNQFSLKLSSVTAADTAVYYCACSVTIFGVVTPAFDIWGQGTMVTVSSASTKGPSVFPLAPSSKSTSGGTAALGCLVKDYFPEPVTVSWNSGALTSGVHTFPAVLQSSG

SEQ ID NO: 362 - protein, 122 aa, Human
QVQLQESGPGLVKPSETLSLTCTVSGGSISSSYWSWIRQPPGKGLEWIGYIYYSGNTNYNPSLKSRVTLSIDTSKNQFSLKLSSVTAADTAVYYCACSVTIFGVVTPAFDIWGQGTMVTVSS

SEQ ID NO: 363 - protein, 5 aa, Human
SSYWS

SEQ ID NO: 364 - protein, 16 aa, Human
YIYYSGNTNYNPSLKS

SEQ ID NO: 365 - protein, 14 aa, Human
SVTIFGVVTPAFDI

SEQ ID NO: 366 - protein, 30 aa, Human; identical to SEQ ID NO: 24

SEQ ID NO: 367 - protein, 14 aa, Human
WIRQPPGKGLEWIG

SEQ ID NO: 368 - protein, 32 aa, Human
RVTLSIDTSKNQFSLKLSSVTAADTAVYYCAC

SEQ ID NO: 369 - protein, 11 aa, Human
WGQGTMVTVSS

SEQ ID NO: 370 - protein, 187 aa, Human
EIVLTHSPGTLSLSPGERATLSCRASQSVRSYLAWYQQKPGQAPRLLIYGASSRATGIPDRFSGSGSGTDFTLTISRLEPDDFAVYYCQQYGSSPWTFGQGTKVEIKRTVAAPSVFIFPPSDEQLKSGTASVVCLLNNFYPREAKVQWKVDNALQSGNSQESVTEQDSKDSTYSLSSTLTLSKADYE

SEQ ID NO: 371 - protein, 107 aa, Human
EIVLTHSPGTLSLSPGERATLSCRASQSVRSYLAWYQQKPGQAPRLLIYGASSRATGIPDRFSGSGSGTDFTLTISRLEPDDFAVYYCQQYGSSPWTFGQGTKVEIK

SEQ ID NO: 372 - protein, 11 aa, Human
RASQSVRSYLA

SEQ ID NO: 373 - protein, 7 aa, Human
GASSRAT

SEQ ID NO: 374 - protein, 9 aa, Human
QQYGSSPWT

SEQ ID NO: 375 - protein, 23 aa, Human
EIVLTHSPGTLSLSPGERATLSC

SEQ ID NO: 376 - protein, 15 aa, Human
WYQQKPGQAPRLLIY

SEQ ID NO: 377 - protein, 32 aa, Human
GIPDRFSGSGSGTDFTLTISRLEPDDFAVYYC

SEQ ID NO: 378 - protein, 10 aa, Human
FGQGTKVEIK

SEQ ID NO: 379 - protein, 198 aa, Human
QVQLVQSGAEVKKPGSSVKVSCKASGGTFSSYAISWVRQAPGQGLEWMGRIIPILGIANYAQKFQGRVTITADKSTSTAYMELSSLRSEDTAVYYCARWDFGVVIQYGMDVWGQGTTVTVSSASTKGPSVFPLAPSSKSTSGGTAALGCLVKDYFPEPVTVSWNSGALTSGVHTFPAVLQSSGLYSLSSVVTVPSSSL

SEQ ID NO: 380 - protein, 122 aa, Human
QVQLVQSGAEVKKPGSSVKVSCKASGGTFSSYAISWVRQAPGQGLEWMGRIIPILGIANYAQKFQGRVTITADKSTSTAYMELSSLRSEDTAVYYCARWDFGVVIQYGMDVWGQGTTVTVSS

SEQ ID NO: 381 - protein, 5 aa, Human
SYAIS

SEQ ID NO: 382 - protein, 17 aa, Human
RIIPILGIANYAQKFQG

SEQ ID NO: 383 - protein, 13 aa, Human
WDFGVVIQYGMDV

SEQ ID NO: 384 - protein, 30 aa, Human
QVQLVQSGAEVKKPGSSVKVSCKASGGTFS

SEQ ID NO: 385 - protein, 14 aa, Human
WVRQAPGQGLEWMG

SEQ ID NO: 386 - protein, 32 aa, Human; identical to SEQ ID NO: 188

SEQ ID NO: 387 - protein, 11 aa, Human
WGQGTTVTVSS

SEQ ID NO: 388 - protein, 178 aa, Human
QAVVTQEPSLTVSPGGTVTLTCGSSTGAVTSGHYPYWFQQKPGQAPRTLIYDTSNKHSWTPARFSGSLLGGKAALTLSGAQPEDEAEYYCLLSYSGWVFGGGTKLTVLGQPKAAPSVTLFPPSSEELQANKATLVCLISDFYPGAVTVAWKADSSPVKAGVETTTPSKQSNNKYAASS

SEQ ID NO: 389 - protein, 108 aa, Human
QAVVTQEPSLTVSPGGTVTLTCGSSTGAVTSGHYPYWFQQKPGQAPRTLIYDTSNKHSWTPARFSGSLLGGKAALTLSGAQPEDEAEYYCLLSYSGWVFGGGTKLTVL

SEQ ID NO: 390 - protein, 14 aa, Human
GSSTGAVTSGHYPY

SEQ ID NO: 391 - protein, 7 aa, Human
DTSNKHS

SEQ ID NO: 392 - protein, 8 aa, Human
LLSYSGWV

SEQ ID NO: 393 - protein, 22 aa, Human
QAVVTQEPSLTVSPGGTVTLTC

SEQ ID NO: 394 - protein, 15 aa, Human
WFQQKPGQAPRTLIY

SEQ ID NO: 395 - protein, 32 aa, Human
WTPARFSGSLLGGKAALTLSGAQPEDEAEYYC

SEQ ID NO: 396 - protein, 10 aa, Human
FGGGTKLTVL

SEQ ID NO: 397 - protein, 183 aa, Human
QVQLQESGPGLVKPSETLSLTCTVSGGSINSFYWNWIRQPPGKGLEWIGYIYYSGNTKYNPSLKSRVTISVDTSNSQFSLKLSSVTAADTAVYYCAALKKQELVSLQAFDIWGQGTMVTVSSASTKGPSVFPLAPSSKSTSGGTAALGCLVKDYFPEPVTVSWNSGALTSGVHTFPAVLQSSG

SEQ ID NO: 398 - protein, 122 aa, Human
QVQLQESGPGLVKPSETLSLTCTVSGGSINSFYWNWIRQPPGKGLEWIGYIYYSGNTKYNPSLKSRVTISVDTSNSQFSLKLSSVTAADTAVYYCAALKKQELVSLQAFDIWGQGTMVTVSS

SEQ ID NO: 399 - protein, 5 aa, Human
SFYWN

SEQ ID NO: 400 - protein, 16 aa, Human
YIYYSGNTKYNPSLKS

SEQ ID NO: 401 - protein, 14 aa, Human
LKKQELVSLQAFDI

SEQ ID NO: 402 - protein, 30 aa, Human
QVQLQESGPGLVKPSETLSLTCTVSGGSIN

SEQ ID NO: 403 - protein, 14 aa, Human
WIRQPPGKGLEWIG

SEQ ID NO: 404 - protein, 32 aa, Human
RVTISVDTSNSQFSLKLSSVTAADTAVYYCAA

SEQ ID NO: 405 - protein, 11 aa, Human
WGQGTMVTVSS

SEQ ID NO: 406 - protein, 157 aa, Human
DIQMTQSPSSLSASLGDGVTITCRASQSISSYLSWYQQKPGKAPKLLIYAASSLQSGVPSRFSGSGSGTDFTLTISSLQPEDFATYYCQQSYNTPVTFGQGTKVEIKRTVAAPSVFIFPPSDEQLKSGTASVVCLLNNFYPREAKVQWKVDNADRKS

SEQ ID NO: 407 - protein, 107 aa, Human
DIQMTQSPSSLSASLGDGVTITCRASQSISSYLSWYQQKPGKAPKLLIYAASSLQSGVPSRFSGSGSGTDFTLTISSLQPEDFATYYCQQSYNTPVTFGQGTKVEIK

SEQ ID NO: 408 - protein, 11 aa, Human
RASQSISSYLS

SEQ ID NO: 409 - protein, 7 aa, Human
AASSLQS

SEQ ID NO: 410 - protein, 9 aa, Human
QQSYNTPVT

SEQ ID NO: 411 - protein, 23 aa, Human
DIQMTQSPSSLSASLGDGVTITC

SEQ ID NO: 412 - protein, 15 aa, Human
WYQQKPGKAPKLLIY

SEQ ID NO: 413 - protein, 32 aa, Human; identical to SEQ ID NO: 305

SEQ ID NO: 414 - protein, 10 aa, Human
FGQGTKVEIK

SEQ ID NO: 415 - protein, 183 aa, Human
QVQLQESGPGLVKPSETLSLTCTVSGGSISSYYWSWIRQPPGKGLEWIGYIYYSGSTKYNPSLKSRVTISVDTSKNQFSLKLTSVTAADTAVYYCARIYDSSGYYHPVFDYWGQGTLVTVSSASTKGPSVFPLAPSSKSTSGGTAALGCLVKDYFPEPVTVSWNSGALTSGVHTFPAVLQSSG

SEQ ID NO: 416 - protein, 122 aa, Human
QVQLQESGPGLVKPSETLSLTCTVSGGSISSYYWSWIRQPPGKGLEWIGYIYYSGSTKYNPSLKSRVTISVDTSKNQFSLKLTSVTAADTAVYYCARIYDSSGYYHPVFDYWGQGTLVTVSS

SEQ ID NO: 417 - protein, 5 aa, Human
SYYWS

SEQ ID NO: 418 - protein, 16 aa, Human
YIYYSGSTKYNPSLKS

SEQ ID NO: 419 - protein, 14 aa, Human
IYDSSGYYHPVFDY

SEQ ID NO: 420 - protein, 30 aa, Human; identical to SEQ ID NO: 24

SEQ ID NO: 421 - protein, 14 aa, Human
WIRQPPGKGLEWIG

SEQ ID NO: 422 - protein, 32 aa, Human
RVTISVDTSKNQFSLKLTSVTAADTAVYYCAR

SEQ ID NO: 423 - protein, 11 aa, Human
WGQGTLVTVSS

SEQ ID NO: 424 - protein, 153 aa, Human
EIVLTQSPGTLSLSPGERATLSCRASQSVSSSYLAWYQQKPGQAPRLLIYGASSRATDIPDRFSGSGSGTDFTLTISRLEPEDFAVYYCQQYGSSPWTFGQGTKVEIKRTVAAPSVFIFPPSDEQLKSGTASVVCLLNNFYPREAKVQWKVDN

SEQ ID NO: 425 - protein, 108 aa, Human
EIVLTQSPGTLSLSPGERATLSCRASQSVSSSYLAWYQQKPGQAPRLLIYGASSRATDIPDRFSGSGSGTDFTLTISRLEPEDFAVYYCQQYGSSPWTFGQGTKVEIK

SEQ ID NO: 426 - protein, 12 aa, Human
RASQSVSSSYLA

SEQ ID NO: 427 - protein, 7 aa, Human
GASSRAT

SEQ ID NO: 428 - protein, 9 aa, Human
QQYGSSPWT

SEQ ID NO: 429 - protein, 23 aa, Human
EIVLTQSPGTLSLSPGERATLSC

SEQ ID NO: 430 - protein, 15 aa, Human
WYQQKPGQAPRLLIY

SEQ ID NO: 431 - protein, 32 aa, Human
DIPDRFSGSGSGTDFTLTISRLEPEDFAVYYC

SEQ ID NO: 432 - protein, 10 aa, Human
FGQGTKVEIK

SEQ ID NO: 433 - protein, 188 aa, Human
QVQLVQSGAEVKKPGASVRVSCKASGYTFTSYYIYWVRQAPGQGLEWMGVINPSGGSTSYAQKFQGRVTLTRDTSTSTVYMDLSSLRSEDTAVYYCARDPIMWEVVTRGRGNWFDPWGQGTLVTVSSASTKGPSVFPLAPSSKSTSGGTAALGCLVKDYFPEPVTVSWNSGALTSGVHTFPAVLQSSG

SEQ ID NO: 434 - protein, 127 aa, Human
QVQLVQSGAEVKKPGASVRVSCKASGYTFTSYYIYWVRQAPGQGLEWMGVINPSGGSTSYAQKFQGRVTLTRDTSTSTVYMDLSSLRSEDTAVYYCARDPIMWEVVTRGRGNWFDPWGQGTLVTVSS

SEQ ID NO: 435 - protein, 5 aa, Human
SYYIY

SEQ ID NO: 436 - protein, 17 aa, Human
VINPSGGSTSYAQKFQG

SEQ ID NO: 437 - protein, 18 aa, Human
DPIMWEVVTRGRGNWFDP

SEQ ID NO: 438 - protein, 30 aa, Human
QVQLVQSGAEVKKPGASVRVSCKASGYTFT

SEQ ID NO: 439 - protein, 14 aa, Human
WVRQAPGQGLEWMG

SEQ ID NO: 440 - protein, 32 aa, Human
RVTLTRDTSTSTVYMDLSSLRSEDTAVYYCAR

SEQ ID NO: 441 - protein, 11 aa, Human
WGQGTLVTVSS

SEQ ID NO: 442 - protein, 193 aa, Human
QSVLTQPPSVSGAPGQRVTIPCTGSSFNIGAGYDVHWYQQLPGTAPKLLIFGNSNRPSGVPDRFSGSRSGTSASLAITGLQAEDEADYYCQSYDSSLSGVVFGGGTTLTVLGQPKAAPSVTLFPPSSEELQANKATLVCLISDFYPGAVTVAWKADSSPVKAGVETTTPSKQSNNKYAASSYLSLTPEQWKSH

SEQ ID NO: 443 - protein, 111 aa, Human
QSVLTQPPSVSGAPGQRVTIPCTGSSFNIGAGYDVHWYQQLPGTAPKLLIFGNSNRPSGVPDRFSGSRSGTSASLAITGLQAEDEADYYCQSYDSSLSGVVFGGGTTLTVL

SEQ ID NO: 444 - protein, 14 aa, Human
TGSSFNIGAGYDVH

SEQ ID NO: 445 - protein, 7 aa, Human
GNSNRPS

SEQ ID NO: 446 - protein, 11 aa, Human
QSYDSSLSGVV

SEQ ID NO: 447 - protein, 22 aa, Human
QSVLTQPPSVSGAPGQRVTIPC

SEQ ID NO: 448 - protein, 15 aa, Human
WYQQLPGTAPKLLIF

SEQ ID NO: 449 - protein, 32 aa, Human
GVPDRFSGSRSGTSASLAITGLQAEDEADYYC

SEQ ID NO: 450 - protein, 10 aa, Human
FGGGTTLTVL

SEQ ID NO: 451 - protein, 152 aa, Human
EVQLVESGGGLVQPGGSLRLSCAASGFTVSSNYMSWVRQAPGKGLEWVSVIYSDGNTYYADSVKGRFTISRDNSKNMLYLQMNSLRAEDTAVYYCARDPGQGYCSGGSCAPSYSLDYWGQGTLVTVSSGSASAPTLFPLVSCENSPSDTSSV

SEQ ID NO: 452 - protein, 128 aa, Human
EVQLVESGGGLVQPGGSLRLSCAASGFTVSSNYMSWVRQAPGKGLEWVSVIYSDGNTYYADSVKGRFTISRDNSKNMLYLQMNSLRAEDTAVYYCARDPGQGYCSGGSCAPSYSLDYWGQGTLVTVSS

SEQ ID NO: 453 - protein, 5 aa, Human
SNYMS

SEQ ID NO: 454 - protein, 16 aa, Human
VIYSDGNTYYADSVKG

SEQ ID NO: 455 - protein, 20 aa, Human
DPGQGYCSGGSCAPSYSLDY

SEQ ID NO: 456 - protein, 30 aa, Human
EVQLVESGGGLVQPGGSLRLSCAASGFTVS

SEQ ID NO: 457 - protein, 14 aa, Human
WVRQAPGKGLEWVS

SEQ ID NO: 458 - protein, 32 aa, Human
RFTISRDNSKNMLYLQMNSLRAEDTAVYYCAR

SEQ ID NO: 459 - protein, 11 aa, Human
WGQGTLVTVSS

SEQ ID NO: 460 - protein, 176 aa, Human
SYELTQPPSVSVSPGQTASITCSGDKLGDRYVCWYQQKPGQSPVLVIYQDTKRPSGIPERFSGSNSGNTATLTISGTQAMDEADYYCQAWDSSTWVFGGGTKLTVLGQPKAAPSVTLFPPSSEELQANKATLVCLISDFYPGAVTVAWKADSSPVKAGVETTTPSKQSNNKYAASS

SEQ ID NO: 461 - protein, 106 aa, Human
SYELTQPPSVSVSPGQTASITCSGDKLGDRYVCWYQQKPGQSPVLVIYQDTKRPSGIPERFSGSNSGNTATLTISGTQAMDEADYYCQAWDSSTWVFGGGTKLTVL

SEQ ID NO: 462 - protein, 11 aa, Human
SGDKLGDRYVC

SEQ ID NO: 463 - protein, 7 aa, Human
QDTKRPS

SEQ ID NO: 464 - protein, 9 aa, Human
QAWDSSTWV

SEQ ID NO: 465 - protein, 22 aa, Human
SYELTQPPSVSVSPGQTASITC

SEQ ID NO: 466 - protein, 15 aa, Human
WYQQKPGQSPVLVIY

SEQ ID NO: 467 - protein, 32 aa, Human
GIPERFSGSNSGNTATLTISGTQAMDEADYYC

SEQ ID NO: 468 - protein, 10 aa, Human
FGGGTKLTVL

SEQ ID NO: 469 - protein, 184 aa, Human
EVQLVESGGGLVQPGGSLRLSCAASGFTVSSNYMSWVRQAPGKGLEWVSDIYSGGSTYYADSVKGRFTISRHNSKNTLYLQMNSLRAEDTAVYYCARDRRGYSYGLHHGMDVWGQGTTVTVSSASTKGPSVFPLAPSSKSTSGGTAALGCLVKDYFPEPVTVSWNSGALTSGVHTFPAVLQSSG

SEQ ID NO: 470 - protein, 123 aa, Human
EVQLVESGGGLVQPGGSLRLSCAASGFTVSSNYMSWVRQAPGKGLEWVSDIYSGGSTYYADSVKGRFTISRHNSKNTLYLQMNSLRAEDTAVYYCARDRRGYSYGLHHGMDVWGQGTTVTVSS

SEQ ID NO: 471 - protein, 5 aa, Human
SNYMS

SEQ ID NO: 472 - protein, 16 aa, Human
DIYSGGSTYYADSVKG

SEQ ID NO: 473 - protein, 15 aa, Human
DRRGYSYGLHHGMDV

SEQ ID NO: 474 - protein, 30 aa, Human; identical to SEQ ID NO: 456

SEQ ID NO: 475 - protein, 14 aa, Human
WVRQAPGKGLEWVS

SEQ ID NO: 476 - protein, 32 aa, Human
RFTISRHNSKNTLYLQMNSLRAEDTAVYYCAR

SEQ ID NO: 477 - protein, 11 aa, Human
WGQGTTVTVSS

SEQ ID NO: 478 - protein, 153 aa, Human
EIVLTQSPGTLSLSPGERATLSCRASQSVSSSYLAWYQQKPDQAPRLLIYGASSRATGIPDRFSGSGSGTDFTLTISRLEPEDFAVYYCQQYGSSPNTFGQGTKLEIKRTVAAPSVFIFPPSDEQLKSGTASVVCLLNNFYPREAKVQWKVDN

SEQ ID NO: 479 - protein, 108 aa, Human
EIVLTQSPGTLSLSPGERATLSCRASQSVSSSYLAWYQQKPDQAPRLLIYGASSRATGIPDRFSGSGSGTDFTLTISRLEPEDFAVYYCQQYGSSPNTFGQGTKLEIK

SEQ ID NO: 480 - protein, 12 aa, Human
RASQSVSSSYLA

SEQ ID NO: 481 - protein, 7 aa, Human
GASSRAT

SEQ ID NO: 482 - protein, 9 aa, Human
QQYGSSPNT

SEQ ID NO: 483 - protein, 23 aa, Human
EIVLTQSPGTLSLSPGERATLSC

SEQ ID NO: 484 - protein, 15 aa, Human
WYQQKPDQAPRLLIY

SEQ ID NO: 485 - protein, 32 aa, Human; identical to SEQ ID NO: 233

SEQ ID NO: 486 - protein, 10 aa, Human
FGQGTKLEIK

SEQ ID NO: 487 - protein, 161 aa, Human
QLQLQESGPGLVKPSETLSLTCTVSGGSISSSSYYWGWIRQPPGKGLEWIGSIYYSGSTYYNPSLKSRVTISVDTSKNQFSLKLSSVTAADTAVYYCARRIRRPTSEVVITYVFDYWGQGTLVTVSSAPTKAPDVFPIISGCRHPKDNSPVVLACLITGYH

SEQ ID NO: 488 - protein, 127 aa, Human
QLQLQESGPGLVKPSETLSLTCTVSGGSISSSSYYWGWIRQPPGKGLEWIGSIYYSGSTYYNPSLKSRVTISVDTSKNQFSLKLSSVTAADTAVYYCARRIRRPTSEVVITYVFDYWGQGTLVTVSS

SEQ ID NO: 489 - protein, 7 aa, Human
SSSYYWG

SEQ ID NO: 490 - protein, 16 aa, Human
SIYYSGSTYYNPSLKS

SEQ ID NO: 491 - protein, 17 aa, Human
RIRRPTSEVVITYVFDY

SEQ ID NO: 492 - protein, 30 aa, Human; identical to SEQ ID NO: 294

SEQ ID NO: 493 - protein, 14 aa, Human
WIRQPPGKGLEWIG

SEQ ID NO: 494 - protein, 32 aa, Human; identical to SEQ ID NO: 134

SEQ ID NO: 495 - protein, 11 aa, Human
WGQGTLVTVSS

SEQ ID NO: 496 - protein, 175 aa, Human
AIQLTQSPSSLSASVGDRVTITCRASQGISSALAWYQQKPGKAPKLLIYDASSLESGVPSRFSGSGSGTDFTLTISSLQPEDFATYYCQQFNSYLTFGGGTKVEIKRTVAAPSVFIFPPSDEQLKSGTASVVCLLNNFYPREAKVQWKVDNALQSGNSQESVTEQDSKDSTYSLS

SEQ ID NO: 497 - protein, 106 aa, Human
AIQLTQSPSSLSASVGDRVTITCRASQGISSALAWYQQKPGKAPKLLIYDASSLESGVPSRFSGSGSGTDFTLTISSLQPEDFATYYCQQFNSYLTFGGGTKVEIK

SEQ ID NO: 498 - protein, 11 aa, Human
RASQGISSALA

SEQ ID NO: 499 - protein, 7 aa, Human
DASSLES

SEQ ID NO: 500 - protein, 8 aa, Human
QQFNSYLT

SEQ ID NO: 501 - protein, 23 aa, Human
AIQLTQSPSSLSASVGDRVTITC

SEQ ID NO: 502 - protein, 15 aa, Human
WYQQKPGKAPKLLIY

SEQ ID NO: 503 - protein, 32 aa, Human; identical to SEQ ID NO: 305

SEQ ID NO: 504 - protein, 10 aa, Human
FGGGTKVEIK

SEQ ID NO: 505 - protein, 148 aa, Human
EVQLVESGGGLVQPGGSLRLSCAASGFTVSSNYMSWVRQAPGKGLEWVSVIYSGGSTYYADSVKGRFTISRHNSKNTLYLQMNSLRAEDTAVYYCAREGYCTNGVCYRHAFDIWGQGTMVTVSSGSASAPTLFPLVSCENSPSDTSSV

SEQ ID NO: 506 - protein, 124 aa, Human
EVQLVESGGGLVQPGGSLRLSCAASGFTVSSNYMSWVRQAPGKGLEWVSVIYSGGSTYYADSVKGRFTISRHNSKNTLYLQMNSLRAEDTAVYYCAREGYCTNGVCYRHAFDIWGQGTMVTVSS

SEQ ID NO: 507 - protein, 5 aa, Human
SNYMS

SEQ ID NO: 508 - protein, 16 aa, Human
VIYSGGSTYYADSVKG

SEQ ID NO: 509 - protein, 16 aa, Human
EGYCTNGVCYRHAFDI

SEQ ID NO: 510 - protein, 30 aa, Human; identical to SEQ ID NO: 456

SEQ ID NO: 511 - protein, 14 aa, Human
WVRQAPGKGLEWVS

SEQ ID NO: 512 - protein, 32 aa, Human; identical to SEQ ID NO: 476

SEQ ID NO: 513 - protein, 11 aa, Human
WGQGTMVTVSS

SEQ ID NO: 514 - protein, 180 aa, Human
QTVVTQEPSFSVSPGGTVTLTCGLSSGSVSTSYYPSWYQQTPGQAPRTLIYSTNTRSSGVPDRFSGSILGNKAALTITGAQADDESDYYCVLYMGSGISVFGGGTKLTVLGQPKAAPSVTLFPPSSEELQANKATLVCLISDFYPGAVTVAWKADSSPVKAGVETTTPSKQSNNKYAASS

SEQ ID NO: 515 - protein, 110 aa, Human
QTVVTQEPSFSVSPGGTVTLTCGLSSGSVSTSYYPSWYQQTPGQAPRTLIYSTNTRSSGVPDRFSGSILGNKAALTITGAQADDESDYYCVLYMGSGISVFGGGTKLTVL

SEQ ID NO: 516 - protein, 14 aa, Human
GLSSGSVSTSYYPS

SEQ ID NO: 517 - protein, 7 aa, Human
STNTRSS

SEQ ID NO: 518 - protein, 10 aa, Human
VLYMGSGISV

SEQ ID NO: 519 - protein, 22 aa, Human
QTVVTQEPSFSVSPGGTVTLTC

SEQ ID NO: 520 - protein, 15 aa, Human
WYQQTPGQAPRTLIY

SEQ ID NO: 521 - protein, 32 aa, Human; identical to SEQ ID NO: 341

SEQ ID NO: 522 - protein, 10 aa, Human
FGGGTKLTVL

SEQ ID NO: 523 - protein, 178 aa, Human
QVQLQESGPGLVKPSETLSLTCTVSGGSISSYYWSWIRQPPGKGLEWIGYIYYSGSTNYNPSLKSRVTISVDTSKNQFSLKLSSVTAADTAVYYCARDYYQLPMDVWGQGTTVTVSSASTKGPSVFPLAPSSKSTSGGTAALGCLVKDYFPEPVTVSWNSGALTSGVHTFPAVLQSSG

SEQ ID NO: 524 - protein, 117 aa, Human
QVQLQESGPGLVKPSETLSLTCTVSGGSISSYYWSWIRQPPGKGLEWIGYIYYSGSTNYNPSLKSRVTISVDTSKNQFSLKLSSVTAADTAVYYCARDYYQLPMDVWGQGTTVTVSS

SEQ ID NO: 525 - protein, 5 aa, Human
SYYWS

SEQ ID NO: 526 - protein, 16 aa, Human
YIYYSGSTNYNPSLKS

SEQ ID NO: 527 - protein, 9 aa, Human
DYYQLPMDV

SEQ ID NO: 528 - protein, 30 aa, Human; identical to SEQ ID NO: 24

SEQ ID NO: 529 - protein, 14 aa, Human
WIRQPPGKGLEWIG

SEQ ID NO: 530 - protein, 32 aa, Human; identical to SEQ ID NO: 134

SEQ ID NO: 531 - protein, 11 aa, Human
WGQGTTVTVSS

SEQ ID NO: 532 - protein, 180 aa, Human
QSVLTQPPSASGTPGQRVTISCSGSSSNIGSNYVYWYQQLPGTAPKLLIYRNNQRPSGVPDRFSGSKSGTSASLAISGLRSEDEADYYCAAWDDSLSGRVFGGGTKLTVLGQPKAAPSVTLFPPSSEELQANKATLVCLISDFYPGAVTVAWKADSSPVKAGVETTTPSKQSNNKYAASS

SEQ ID NO: 533 - protein, 110 aa, Human
QSVLTQPPSASGTPGQRVTISCSGSSSNIGSNYVYWYQQLPGTAPKLLIYRNNQRPSGVPDRFSGSKSGTSASLAISGLRSEDEADYYCAAWDDSLSGRVFGGGTKLTVL

SEQ ID NO: 534 - protein, 13 aa, Human
SGSSSNIGSNYVY

SEQ ID NO: 535 - protein, 7 aa, Human
RNNQRPS

SEQ ID NO: 536 - protein, 11 aa, Human
AAWDDSLSGRV

SEQ ID NO: 537 - protein, 22 aa, Human
QSVLTQPPSASGTPGQRVTISC

SEQ ID NO: 538 - protein, 15 aa, Human
WYQQLPGTAPKLLIY

SEQ ID NO: 539 - protein, 32 aa, Human
GVPDRFSGSKSGTSASLAISGLRSEDEADYYC

SEQ ID NO: 540 - protein, 10 aa, Human
FGGGTKLTVL

SEQ ID NO: 541 - protein, 185 aa, Human
EVQLVESGGGLVQPGGSLRLSCAVSGFTFSSYSMNWVRQAPGKGLEWVSYISSSSSIIYYADSVKGRFTISRDNAKNSLYLQMNSLRAEDTAVYYCARDFLDYSRSYSYGMDVWGQGTTVTVSSASTKGPSVFPLAPSSKSTSGGTAALGCLVKDYFPEPVTVSWNSGALTSGVHTFPAVLQSSG

SEQ ID NO: 542 - protein, 124 aa, Human
EVQLVESGGGLVQPGGSLRLSCAVSGFTFSSYSMNWVRQAPGKGLEWVSYISSSSSIIYYADSVKGRFTISRDNAKNSLYLQMNSLRAEDTAVYYCARDFLDYSRSYSYGMDVWGQGTTVTVSS

SEQ ID NO: 543 - protein, 5 aa, Human
SYSMN

SEQ ID NO: 544 - protein, 17 aa, Human
YISSSSSIIYYADSVKG

SEQ ID NO: 545 - protein, 15 aa, Human
DFLDYSRSYSYGMDV

SEQ ID NO: 546 - protein, 30 aa, Human
EVQLVESGGGLVQPGGSLRLSCAVSGFTFS

SEQ ID NO: 547 - protein, 14 aa, Human
WVRQAPGKGLEWVS

SEQ ID NO: 548 - protein, 32 aa, Human; identical to SEQ ID NO: 332

SEQ ID NO: 549 - protein, 11 aa, Human
WGQGTTVTVSS

SEQ ID NO: 550 - protein, 180 aa, Human
SYVLTQPPSVSVAPGQTARITCGGDNIGSKNVHWYQQKPGQAPVLVVFDDSDRPSGIPERFSGSNSGNTATLTISRVEAGDEADYYCQVWDSSSDHYVVFGGGTKLTVLGQPKAAPSVTLFPPSSEELQANKATLVCLISDFYPGAVTVAWKADSSPVKAGVETTTPSKQSNNKYAASSY

SEQ ID NO: 551 - protein, 109 aa, Human
SYVLTQPPSVSVAPGQTARITCGGDNIGSKNVHWYQQKPGQAPVLVVFDDSDRPSGIPERFSGSNSGNTATLTISRVEAGDEADYYCQVWDSSSDHYVVFGGGTKLTVL

SEQ ID NO: 552 - protein, 11 aa, Human
GGDNIGSKNVH

SEQ ID NO: 553 - protein, 7 aa, Human
DDSDRPS

SEQ ID NO: 554 - protein, 12 aa, Human
QVWDSSSDHYVV

SEQ ID NO: 555 - protein, 22 aa, Human
SYVLTQPPSVSVAPGQTARITC

SEQ ID NO: 556 - protein, 15 aa, Human
WYQQKPGQAPVLVVF

SEQ ID NO: 557 - protein, 32 aa, Human; identical to SEQ ID NO: 17

SEQ ID NO: 558 - protein, 10 aa, Human
FGGGTKLTVL

SEQ ID NO: 559 - protein, 130 aa, Human
EVQLVESGGGLVQPGRSLRLSCTASGFTFGDYAMSWFRQAPGKGLEWVGFIRSKAYGGTTQYAASVKGRFTISRDDSKSIAYLQMNSLKTEDTAVYYCTRVRYCTNGVCYGYHFDYWGQGTVVTVSSAST

SEQ ID NO: 560 - protein, 127 aa, Human
EVQLVESGGGLVQPGRSLRLSCTASGFTFGDYAMSWFRQAPGKGLEWVGFIRSKAYGGTTQYAASVKGRFTISRDDSKSIAYLQMNSLKTEDTAVYYCTRVRYCTNGVCYGYHFDYWGQGTVVTVSS

SEQ ID NO: 561 - protein, 5 aa, Human
DYAMS

SEQ ID NO: 562 - protein, 19 aa, Human
FIRSKAYGGTTQYAASVKG

SEQ ID NO: 563 - protein, 16 aa, Human
VRYCTNGVCYGYHFDY

SEQ ID NO: 564 - protein, 30 aa, Human; identical to SEQ ID NO: 240

SEQ ID NO: 565 - protein, 14 aa, Human
WFRQAPGKGLEWVG

SEQ ID NO: 566 - protein, 32 aa, Human; identical to SEQ ID NO: 314

SEQ ID NO: 567 - protein, 11 aa, Human
WGQGTVVTVSS

SEQ ID NO: 568 - protein, 151 aa, Human
EIVMTQSPATLSVSPGERATLSCRASQSVSSNLAWYQQKPGQAPRLLIYGASTRATGIPARFSGSGSGTEFTLTISSLQSEDFAVYYCQQYNNWWTFGQGTKVEIKRTVAAPSVFIFPPSDEQLKSGTASVVCLLNNFYPREAKVQWKVDN

SEQ ID NO: 569 - protein, 106 aa, Human
EIVMTQSPATLSVSPGERATLSCRASQSVSSNLAWYQQKPGQAPRLLIYGASTRATGIPARFSGSGSGTEFTLTISSLQSEDFAVYYCQQYNNWWTFGQGTKVEIK

SEQ ID NO: 570 - protein, 11 aa, Human
RASQSVSSNLA

SEQ ID NO: 571 - protein, 7 aa, Human
GASTRAT

SEQ ID NO: 572 - protein, 8 aa, Human
QQYNNWWT

SEQ ID NO: 573 - protein, 23 aa, Human
EIVMTQSPATLSVSPGERATLSC

SEQ ID NO: 574 - protein, 15 aa, Human
WYQQKPGQAPRLLIY

SEQ ID NO: 575 - protein, 32 aa, Human; identical to SEQ ID NO: 251

SEQ ID NO: 576 - protein, 10 aa, Human
FGQGTKVEIK

SEQ ID NO: 577 - protein, 183 aa, Human
QVQLQESGPGLVKPSETLSLTCTVSGGSISSYYWSWIRQPPGKGLEWIGYVYYSGNTKYNPSLKSRVTISVDTSKNQFSLKLGSVTAADTAVYYCARHSRIEVAGTLDFDYWGQGTLVTVSSASTKGPSVFPLAPSSKSTSGGTAALGCLVKDYFPEPVTVSWNSGALTSGVHTFPAVLQSSG

SEQ ID NO: 578 - protein, 122 aa, Human
QVQLQESGPGLVKPSETLSLTCTVSGGSISSYYWSWIRQPPGKGLEWIGYVYYSGNTKYNPSLKSRVTISVDTSKNQFSLKLGSVTAADTAVYYCARHSRIEVAGTLDFDYWGQGTLVTVSS

SEQ ID NO: 579 - protein, 5 aa, Human
SYYWS

SEQ ID NO: 580 - protein, 16 aa, Human
YVYYSGNTKYNPSLKS

SEQ ID NO: 581 - protein, 14 aa, Human
HSRIEVAGTLDFDY

SEQ ID NO: 582 - protein, 30 aa, Human; identical to SEQ ID NO: 24

SEQ ID NO: 583 - protein, 14 aa, Human
WIRQPPGKGLEWIG

SEQ ID NO: 584 - protein, 32 aa, Human
RVTISVDTSKNQFSLKLGSVTAADTAVYYCAR

SEQ ID NO: 585 - protein, 11 aa, Human
WGQGTLVTVSS

SEQ ID NO: 586 - protein, 152 aa, Human
DIQMTQSPSSLSASVGDRVTITCRASQSIRSYLNWYQQKRGKAPKLLIYAASSLQSGVPSRFSGSGSGTDFTLTISSLQPEDFATYYCQQSYSTPPTFGQGTKVEIKRTVAAPSVFIFPPSDEQLKSGTASVVCLLNNFYPREAKVQWKVDN

SEQ ID NO: 587 - protein, 107 aa, Human
DIQMTQSPSSLSASVGDRVTITCRASQSIRSYLNWYQQKRGKAPKLLIYAASSLQSGVPSRFSGSGSGTDFTLTISSLQPEDFATYYCQQSYSTPPTFGQGTKVEIK

SEQ ID NO: 588 - protein, 11 aa, Human
RASQSIRSYLN

SEQ ID NO: 589 - protein, 7 aa, Human
AASSLQS

SEQ ID NO: 590 - protein, 9 aa, Human
QQSYSTPPT

SEQ ID NO: 591 - protein, 23 aa, Human
DIQMTQSPSSLSASVGDRVTITC

SEQ ID NO: 592 - protein, 15 aa, Human
WYQQKRGKAPKLLIY

SEQ ID NO: 593 - protein, 32 aa, Human; identical to SEQ ID NO: 305

SEQ ID NO: 594 - protein, 10 aa, Human
FGQGTKVEIK

SEQ ID NO: 595 - protein, 192 aa, Human
QVQLVESGGGVVQPGRSLRLSCAASGFTFSNYGMHWVRQAPGKGLEWVAVIWYDGSNKYYADSVKGRFTISRDNSKNTLYLQMNSLRAEDTAVYYCARGDCTNGVCHPLLIYYDSSGLDYWGQGTLVTVSSASTKGPSVFPLAPSSKSTSGGTAALGCLVKDYFPEPVTVSWNSGALTSGVHTFPAVLQSSG

SEQ ID NO: 596 - protein, 131 aa, Human
QVQLVESGGGVVQPGRSLRLSCAASGFTFSNYGMHWVRQAPGKGLEWVAVIWYDGSNKYYADSVKGRFTISRDNSKNTLYLQMNSLRAEDTAVYYCARGDCTNGVCHPLLIYYDSSGLDYWGQGTLVTVSS

SEQ ID NO: 597 - protein, 5 aa, Human
NYGMH

SEQ ID NO: 598 - protein, 17 aa, Human
VIWYDGSNKYYADSVKG

SEQ ID NO: 599 - protein, 22 aa, Human
GDCTNGVCHPLLIYYDSSGLDY

SEQ ID NO: 600 - protein, 30 aa, Human; identical to SEQ ID NO: 168

SEQ ID NO: 601 - protein, 14 aa, Human
WVRQAPGKGLEWVA

SEQ ID NO: 602 - protein, 32 aa, Human; identical to SEQ ID NO: 170

SEQ ID NO: 603 - protein, 11 aa, Human
WGQGTLVTVSS

SEQ ID NO: 604 - protein, 176 aa, Human
EIVLTQSPATLSLSPGERATLSCRASQSVSSYLAWYQQKPGQAPRLLIYDASNRATGIPARFSGSGSGTDFTLTISSLEPEDFAVYYCQQRSNWPPITFGPGTKVDIKRTVAAPSVFIFPPSDEQLKSGTASVVCLLNNFYPREAKVQWKVDNALQSGNSQESVTEQDSKDSTYSL

SEQ ID NO: 605 - protein, 108 aa, Human
EIVLTQSPATLSLSPGERATLSCRASQSVSSYLAWYQQKPGQAPRLLIYDASNRATGIPARFSGSGSGTDFTLTISSLEPEDFAVYYCQQRSNWPPITFGPGTKVDIK

SEQ ID NO: 606 - protein, 11 aa, Human
RASQSVSSYLA

SEQ ID NO: 607 - protein, 7 aa, Human
DASNRAT

SEQ ID NO: 608 - protein, 10 aa, Human
QQRSNWPPIT

SEQ ID NO: 609 - protein, 23 aa, Human
EIVLTQSPATLSLSPGERATLSC

SEQ ID NO: 610 - protein, 15 aa, Human
WYQQKPGQAPRLLIY

SEQ ID NO: 611 - protein, 32 aa, Human; identical to SEQ ID NO: 215

SEQ ID NO: 612 - protein, 10 aa, Human
FGPGTKVDIK

SEQ ID NO: 613 - protein, 156 aa, Human
QVQLVESGGGVVQPGRSLRLSCAASGFTFTSYAMHWVRQAPGKGLEWVAVISYDGGSKYYADSVKGRFTISRDNSKNTLYLQMNSLRAEDTAVYYCARTTPGITAAGTGTLGRYYYYGMDVWGQGTTVTVSSGSASAPTLFPLVSCENSPSDTSSV

SEQ ID NO: 614 - protein, 132 aa, Human
QVQLVESGGGVVQPGRSLRLSCAASGFTFTSYAMHWVRQAPGKGLEWVAVISYDGGSKYYADSVKGRFTISRDNSKNTLYLQMNSLRAEDTAVYYCARTTPGITAAGTGTLGRYYYYGMDVWGQGTTVTVSS

SEQ ID NO: 615 - protein, 5 aa, Human
SYAMH

SEQ ID NO: 616 - protein, 17 aa, Human
VISYDGGSKYYADSVKG

SEQ ID NO: 617 - protein, 23 aa, Human
TTPGITAAGTGTLGRYYYYGMDV

SEQ ID NO: 618 - protein, 30 aa, Human
QVQLVESGGGVVQPGRSLRLSCAASGFTFT

SEQ ID NO: 619 - protein, 14 aa, Human
WVRQAPGKGLEWVA

SEQ ID NO: 620 - protein, 32 aa, Human; identical to SEQ ID NO: 170

SEQ ID NO: 621 - protein, 11 aa, Human
WGQGTTVTVSS

SEQ ID NO: 622 - protein, 187 aa, Human
AIQLTQSPSSLSASVGDRVTITCRASQGISSALAWYQQTPGKAPKLLIYDASSLESGVPSRFSGSGSGTDFSLTIGSLQPEDFASYYCQQFNSYPLTFGGGTKVEIKRTVAAPSVFIFPPSDEQLKSGTASVVCLLNNFYPREAKVQWKVDNALQSGNSQESVTEQDSKDSTYSLSSTLTLSKADYE

SEQ ID NO: 623 - protein, 107 aa, Human
AIQLTQSPSSLSASVGDRVTITCRASQGISSALAWYQQTPGKAPKLLIYDASSLESGVPSRFSGSGSGTDFSLTIGSLQPEDFASYYCQQFNSYPLTFGGGTKVEIK

SEQ ID NO: 624 - protein, 11 aa, Human
RASQGISSALA

SEQ ID NO: 625 - protein, 7 aa, Human
DASSLES

SEQ ID NO: 626 - protein, 9 aa, Human
QQFNSYPLT

SEQ ID NO: 627 - protein, 23 aa, Human
AIQLTQSPSSLSASVGDRVTITC

SEQ ID NO: 628 - protein, 15 aa, Human
WYQQTPGKAPKLLIY

SEQ ID NO: 629 - protein, 32 aa, Human
GVPSRFSGSGSGTDFSLTIGSLQPEDFASYYC

SEQ ID NO: 630 - protein, 10 aa, Human
FGGGTKVEIK

SEQ ID NO: 631 - protein, 186 aa, Human
QVQLVQSGAEVKKPGASVKVSCKVSGYTLIELSMHWVRQAPGKGLEWMGGFDPEDGETIYAQKFQGRVTMTEDTSTDTAYMALSSLTSEDTAVYYCATAYAYYYASGGYYTLDYWGQGTLVTVSSASTKGPSVFPLAPSSKSTSGGTAALGCLVKDYFPEPVTVSWNSGALTSGVHTFPAVLQSSG

SEQ ID NO: 632 - protein, 125 aa, Human
QVQLVQSGAEVKKPGASVKVSCKVSGYTLIELSMHWVRQAPGKGLEWMGGFDPEDGETIYAQKFQGRVTMTEDTSTDTAYMALSSLTSEDTAVYYCATAYAYYYASGGYYTLDYWGQGTLVTVSS

SEQ ID NO: 633 - protein, 5 aa, Human
ELSMH

SEQ ID NO: 634 - protein, 17 aa, Human
GFDPEDGETIYAQKFQG

SEQ ID NO: 635 - protein, 16 aa, Human
AYAYYYASGGYYTLDY

SEQ ID NO: 636 - protein, 30 aa, Human
QVQLVQSGAEVKKPGASVKVSCKVSGYTLI

SEQ ID NO: 637 - protein, 14 aa, Human
WVRQAPGKGLEWMG

SEQ ID NO: 638 - protein, 32 aa, Human
RVTMTEDTSTDTAYMALSSLTSEDTAVYYCAT

SEQ ID NO: 639 - protein, 11 aa, Human
WGQGTLVTVSS

SEQ ID NO: 640 - protein, 180 aa, Human
QAGLTQPPSVSKGLRQTATLTCTGSSNNVGNQGAAWLQQHQGHPPKLLSYRNNNRPSGISERFSASRSGNTASLTITGLQPEDEADYYCSAWDSSLSNWVFGGGTKLTVLGQPKAAPSVTLFPPSSEELQANKATLVCLISDFYPGAVTVAWKADSSPVKAGVETTTPSKQSNNKYAASS

SEQ ID NO: 641 - protein, 110 aa, Human
QAGLTQPPSVSKGLRQTATLTCTGSSNNVGNQGAAWLQQHQGHPPKLLSYRNNNRPSGISERFSASRSGNTASLTITGLQPEDEADYYCSAWDSSLSNWVFGGGTKLTVL

SEQ ID NO: 642 - protein, 13 aa, Human
TGSSNNVGNQGAA

SEQ ID NO: 643 - protein, 7 aa, Human
RNNNRPS

SEQ ID NO: 644 - protein, 11 aa, Human
SAWDSSLSNWV

SEQ ID NO: 645 - protein, 22 aa, Human
QAGLTQPPSVSKGLRQTATLTC

SEQ ID NO: 646 - protein, 15 aa, Human
WLQQHQGHPPKLLSY

SEQ ID NO: 647 - protein, 32 aa, Human
GISERFSASRSGNTASLTITGLQPEDEADYYC

SEQ ID NO: 648 - protein, 10 aa, Human
FGGGTKLTVL

SEQ ID NO: 649 - protein, 143 aa, Human
QITLKESGPTLVKPTQTLTLTCTFSGFSLNTSGVGVGWIRQPPGKALEWLALIYWDDDKRYSPSLKSRLTITKDTSKNQVVLTMTNMDPVDTATYYCAHHTIVPIFDYWGQGTLVTVSSGSASAPTLFPLVSCENSPSDTSSV

SEQ ID NO: 650 - protein, 119 aa, Human
QITLKESGPTLVKPTQTLTLTCTFSGFSLNTSGVGVGWIRQPPGKALEWLALIYWDDDKRYSPSLKSRLTITKDTSKNQVVLTMTNMDPVDTATYYCAHHTIVPIFDYWGQGTLVTVSS

SEQ ID NO: 651 - protein, 7 aa, Human
TSGVGVG

SEQ ID NO: 652 - protein, 16 aa, Human
LIYWDDDKRYSPSLKS

SEQ ID NO: 653 - protein, 9 aa, Human
HTIVPIFDY

SEQ ID NO: 654 - protein, 30 aa, Human
QITLKESGPTLVKPTQTLTLTCTFSGFSLN

SEQ ID NO: 655 - protein, 14 aa, Human
WIRQPPGKALEWLA

SEQ ID NO: 656 - protein, 32 aa, Human
RLTITKDTSKNQVVLTMTNMDPVDTATYYCAH

SEQ ID NO: 657 - protein, 11 aa, Human
WGQGTLVTVSS

SEQ ID NO: 658 - protein, 186 aa, Human
QSALTQPASVSGSPGQSITISCTGTSSDVGGYNYVSWYQQHPGKAPKLMIYDVSNRPSGVSNRFSGSKSGNTASLTISGLQAEDEADYYCNSYTSSSTLVVFGGGTKLTVLGQPKAAPSVTLFPPSSEELQANKATLVCLISDFYPGAVTVAWKADSSPVKAGVETTTPSKQSNNKYAASSYLSLT

SEQ ID NO: 659 - protein, 111 aa, Human
QSALTQPASVSGSPGQSITISCTGTSSDVGGYNYVSWYQQHPGKAPKLMIYDVSNRPSGVSNRFSGSKSGNTASLTISGLQAEDEADYYCNSYTSSSTLVVFGGGTKLTVL

SEQ ID NO: 660 - protein, 14 aa, Human
TGTSSDVGGYNYVS

SEQ ID NO: 661 - protein, 7 aa, Human
DVSNRPS

SEQ ID NO: 662 - protein, 11 aa, Human
NSYTSSSTLVV

SEQ ID NO: 663 - protein, 22 aa, Human
QSALTQPASVSGSPGQSITISC

SEQ ID NO: 664 - protein, 15 aa, Human
WYQQHPGKAPKLMIY

SEQ ID NO: 665 - protein, 32 aa, Human; identical to SEQ ID NO: 71

SEQ ID NO: 666 - protein, 10 aa, Human
FGGGTKLTVL

SEQ ID NO: 667 - protein, 186 aa, Human
QVQLQESGPGLVKPSETLSLTCTVSGGSISSYYWSWIRQPPGKGLEWIGNIYNSGSTNYNPSLKSRLTISVDTSKNHFSLKLSSVTAADTAVYYCARGGLEHDGDYVYYYGMDVWGQGTTITVSSASTKGPSVFPLAPSSKSTSGGTAALGCLVKDYFPEPVTVSWNSGALTSGVHTFPAVLQSSG

SEQ ID NO: 668 - protein, 125 aa, Human
QVQLQESGPGLVKPSETLSLTCTVSGGSISSYYWSWIRQPPGKGLEWIGNIYNSGSTNYNPSLKSRLTISVDTSKNHFSLKLSSVTAADTAVYYCARGGLEHDGDYVYYYGMDVWGQGTTITVSS

SEQ ID NO: 669 - protein, 5 aa, Human
SYYWS

SEQ ID NO: 670 - protein, 16 aa, Human
NIYNSGSTNYNPSLKS

SEQ ID NO: 671 - protein, 17 aa, Human
GGLEHDGDYVYYYGMDV

SEQ ID NO: 672 - protein, 30 aa, Human; identical to SEQ ID NO: 24

SEQ ID NO: 673 - protein, 14 aa, Human
WIRQPPGKGLEWIG

SEQ ID NO: 674 - protein, 32 aa, Human
RLTISVDTSKNHFSLKLSSVTAADTAVYYCAR

SEQ ID NO: 675 - protein, 11 aa, Human
WGQGTTITVSS

SEQ ID NO: 676 - protein, 177 aa, Human
SYELTQPPSVSVSLGQMARITCSGEALPKKYAYWYQQKPGQFPILVIYKDSERPSGIPERFSGSSSGTIVTLTISGVQAEDEADYYCLSEDSSGTWVFGGGTKLTVLGQPKAAPSVTLFPPSSEELQANKATLVCLISDFYPGAVTVAWKADSSPVKAGVETTTPSKQSNNKYAASS

SEQ ID NO: 677 - protein, 107 aa, Human
SYELTQPPSVSVSLGQMARITCSGEALPKKYAYWYQQKPGQFPILVIYKDSERPSGIPERFSGSSSGTIVTLTISGVQAEDEADYYCLSEDSSGTWVFGGGTKLTVL

SEQ ID NO: 678 - protein, 11 aa, Human
SGEALPKKYAY

SEQ ID NO: 679 - protein, 7 aa, Human
KDSERPS

SEQ ID NO: 680 - protein, 10 aa, Human
LSEDSSGTWV

SEQ ID NO: 681 - protein, 22 aa, Human
SYELTQPPSVSVSLGQMARITC

SEQ ID NO: 682 - protein, 15 aa, Human
WYQQKPGQFPILVIY

SEQ ID NO: 683 - protein, 32 aa, Human
GIPERFSGSSSGTIVTLTISGVQAEDEADYYC

SEQ ID NO: 684 - protein, 10 aa, Human
FGGGTKLTVL

SEQ ID NO: 685 - protein, 158 aa, Human
QVQLVESGGGVVQPGRSLRLSCAASGFTFSSYGMHWVRQAPGKGLEWVAVISYDGSNKYYADSVKGRFTISRDNSKNTLYLQMNSLRAEDTAVYYCAKYTSTVTTNYYYGMDVWGQGTTVTVSSAPTKAPDVFPIISGCRHPKDNSPVVLACLITGYH

SEQ ID NO: 686 - protein, 124 aa, Human
QVQLVESGGGVVQPGRSLRLSCAASGFTFSSYGMHWVRQAPGKGLEWVAVISYDGSNKYYADSVKGRFTISRDNSKNTLYLQMNSLRAEDTAVYYCAKYTSTVTTNYYYGMDVWGQGTTVTVSS

SEQ ID NO: 687 - protein, 5 aa, Human
SYGMH

SEQ ID NO: 688 - protein, 17 aa, Human
VISYDGSNKYYADSVKG

SEQ ID NO: 689 - protein, 15 aa, Human
YTSTVTTNYYYGMDV

SEQ ID NO: 690 - protein, 30 aa, Human; identical to SEQ ID NO: 168

SEQ ID NO: 691 - protein, 14 aa, Human
WVRQAPGKGLEWVA

SEQ ID NO: 692 - protein, 32 aa, Human
RFTISRDNSKNTLYLQMNSLRAEDTAVYYCAK

SEQ ID NO: 693 - protein, 11 aa, Human
WGQGTTVTVSS

SEQ ID NO: 694 - protein, 177 aa, Human
SYELTQPPSVSVSPGQTASITCSGDKLGDKYACWYQQKPGQSPVLVIYQDSKRPSGIPERFSGSNSGNTATLTISGTQAMDEADYYCQAWDSSTVVFGGGTKLTVLGQPKAAPSVTLFPPSSEELQANKATLVCLISDFYPGAVTVAWKADSSPVKAGVETTTPSKQSNNKYAASSY

SEQ ID NO: 695 - protein, 106 aa, Human
SYELTQPPSVSVSPGQTASITCSGDKLGDKYACWYQQKPGQSPVLVIYQDSKRPSGIPERFSGSNSGNTATLTISGTQAMDEADYYCQAWDSSTVVFGGGTKLTVL

SEQ ID NO: 696 - protein, 11 aa, Human
SGDKLGDKYAC

SEQ ID NO: 697 - protein, 7 aa, Human
QDSKRPS

SEQ ID NO: 698 - protein, 9 aa, Human
QAWDSSTVV

SEQ ID NO: 699 - protein, 22 aa, Human
SYELTQPPSVSVSPGQTASITC

SEQ ID NO: 700 - protein, 15 aa, Human
WYQQKPGQSPVLVIY

SEQ ID NO: 701 - protein, 32 aa, Human; identical to SEQ ID NO: 467

SEQ ID NO: 702 - protein, 10 aa, Human
FGGGTKLTVL

SEQ ID NO: 703 - protein, 147 aa, Human
QVQLVESGGGVVQPGRSLRLSCAASGFTFSSYGMHWVRQAPGKGLEWVAVIWYDGSNKYYADSVKGRFTISRDNSKNTLYLQMNSLRAEDTAVYYCARGRSPGGGHYYGMDVWGQGTTVTVSSGSASAPTLFPLVSCENSPSDTSSV

SEQ ID NO: 704 - protein, 123 aa, Human
QVQLVESGGGVVQPGRSLRLSCAASGFTFSSYGMHWVRQAPGKGLEWVAVIWYDGSNKYYADSVKGRFTISRDNSKNTLYLQMNSLRAEDTAVYYCARGRSPGGGHYYGMDVWGQGTTVTVSS

SEQ ID NO: 705 - protein, 5 aa, Human
SYGMH

SEQ ID NO: 706 - protein, 17 aa, Human
VIWYDGSNKYYADSVKG

SEQ ID NO: 707 - protein, 14 aa, Human
GRSPGGGHYYGMDV

SEQ ID NO: 708 - protein, 30 aa, Human; identical to SEQ ID NO: 168

SEQ ID NO: 709 - protein, 14 aa, Human
WVRQAPGKGLEWVA

SEQ ID NO: 710 - protein, 32 aa, Human; identical to SEQ ID NO: 170

SEQ ID NO: 711 - protein, 11 aa, Human
WGQGTTVTVSS

SEQ ID NO: 712 - protein, 176 aa, Human
SYELTQPPSVSVSPGQTASITCSGDKLGDKYACWYQQKPGQSPVLVIYQDSKRPSGIPERFSGSNSGNTATLTISGTQAMDEADYYCQAWDSSSVVFGGGTKLTVLGQPKAAPSVTLFPPSSEELQANKATLVCLISDFYPGAVTVAWKADSSPVKAGVETTTPSKQSNNKYAASS

SEQ ID NO: 713 - protein, 106 aa, Human
SYELTQPPSVSVSPGQTASITCSGDKLGDKYACWYQQKPGQSPVLVIYQDSKRPSGIPERFSGSNSGNTATLTISGTQAMDEADYYCQAWDSSSVVFGGGTKLTVL

SEQ ID NO: 714 - protein, 11 aa, Human
SGDKLGDKYAC

SEQ ID NO: 715 - protein, 7 aa, Human
QDSKRPS

SEQ ID NO: 716 - protein, 9 aa, Human
QAWDSSSVV

SEQ ID NO: 717 - protein, 22 aa, Human
SYELTQPPSVSVSPGQTASITC

SEQ ID NO: 718 - protein, 15 aa, Human
WYQQKPGQSPVLVIY

SEQ ID NO: 719 - protein, 32 aa, Human; identical to SEQ ID NO: 467

SEQ ID NO: 720 - protein, 10 aa, Human
FGGGTKLTVL

SEQ ID NO: 721 - protein, 148 aa, Human
QVTLRESGPALVKPTQTLTLTCTFSGLSLSSSGMCVSWIRQPPGKALEWLARIDWDDDKYYSTSLKTRLTISKDTSKNQVVLTMTNMDPVDTATYYCARICTMVRGLHDAFDIWGQGTMVTVSSGSASAPTLFPLVSCENSPSDTSSV

SEQ ID NO: 722 - protein, 124 aa, Human
QVTLRESGPALVKPTQTLTLTCTFSGLSLSSSGMCVSWIRQPPGKALEWLARIDWDDDKYYSTSLKTRLTISKDTSKNQVVLTMTNMDPVDTATYYCARICTMVRGLHDAFDIWGQGTMVTVSS

SEQ ID NO: 723 - protein, 7 aa, Human
SSGMCVS

SEQ ID NO: 724 - protein, 16 aa, Human
RIDWDDDKYYSTSLKT

SEQ ID NO: 725 - protein, 14 aa, Human
ICTMVRGLHDAFDI

SEQ ID NO: 726 - protein, 30 aa, Human
QVTLRESGPALVKPTQTLTLTCTFSGLSLS

SEQ ID NO: 727 - protein, 14 aa, Human
WIRQPPGKALEWLA

SEQ ID NO: 728 - protein, 32 aa, Human
RLTISKDTSKNQVVLTMTNMDPVDTATYYCAR

SEQ ID NO: 729 - protein, 11 aa, Human
WGQGTMVTVSS

SEQ ID NO: 730 - protein, 152 aa, Human
DIQMTQSPSTLSASVGDRVTITCRASQSISSWLAWYQQKPGKAPKLLIYKASSLESGVPSRFSGSGSGTEFTLTISSLQPDDFATYYCQQYNSYSWTFGQGTKVEIKRTVAAPSVFIFPPSDEQLKSGTASVVCLLNNFYPREAKVQWKVDN

SEQ ID NO: 731 - protein, 107 aa, Human
DIQMTQSPSTLSASVGDRVTITCRASQSISSWLAWYQQKPGKAPKLLIYKASSLESGVPSRFSGSGSGTEFTLTISSLQPDDFATYYCQQYNSYSWTFGQGTKVEIK

SEQ ID NO: 732 - protein, 11 aa, Human
RASQSISSWLA

SEQ ID NO: 733 - protein, 7 aa, Human
KASSLES

SEQ ID NO: 734 - protein, 9 aa, Human
QQYNSYSWT

SEQ ID NO: 735 - protein, 23 aa, Human
DIQMTQSPSTLSASVGDRVTITC

SEQ ID NO: 736 - protein, 15 aa, Human
WYQQKPGKAPKLLIY

SEQ ID NO: 737 - protein, 32 aa, Human
GVPSRFSGSGSGTEFTLTISSLQPDDFATYYC

SEQ ID NO: 738 - protein, 10 aa, Human
FGQGTKVEIK

SEQ ID NO: 739 - protein, 185 aa, Human
EVQLVQSGAEVKKPGESLKISCKGSGYSFTTYWIAWVRQMPGKGLEWVGIIYPDDSDTRYSPSFQGQVTISADKSIGTAYLQWSSLKASDTAMYYCARGQYYDFWSGAGGVDVWGQGTTVTVSSASTKGPSVFPLAPSSKSTSGGTAALGCLVKDYFPEPVTVSWNSGALTSGVHTFPAVLQSSG

SEQ ID NO: 740 - protein, 124 aa, Human
EVQLVQSGAEVKKPGESLKISCKGSGYSFTTYWIAWVRQMPGKGLEWVGIIYPDDSDTRYSPSFQGQVTISADKSIGTAYLQWSSLKASDTAMYYCARGQYYDFWSGAGGVDVWGQGTTVTVSS

SEQ ID NO: 741 - protein, 5 aa, Human
TYWIA

SEQ ID NO: 742 - protein, 17 aa, Human
IIYPDDSDTRYSPSFQG

SEQ ID NO: 743 - protein, 15 aa, Human
GQYYDFWSGAGGVDV

SEQ ID NO: 744 - protein, 30 aa, Human
EVQLVQSGAEVKKPGESLKISCKGSGYSFT

SEQ ID NO: 745 - protein, 14 aa, Human
WVRQMPGKGLEWVG

SEQ ID NO: 746 - protein, 32 aa, Human
QVTISADKSIGTAYLQWSSLKASDTAMYYCAR

SEQ ID NO: 747 - protein, 11 aa, Human
WGQGTTVTVSS

SEQ ID NO: 748 - protein, 194 aa, Human
QSVLTQPPSVSGAPGQRVTISCTGSRSNIGAGYDVQWYQQVPGTAPKLLISGNSNRPSGVPDRFSGSKSGTSASLAITGLQAEDEADYYCQSYDSSLSGLRVFGGGTKLTVLGQPKAAPSVTLFPPSSEELQANKATLVCLISDFYPGAVTVAWKADSSPVKAGVETTTPSKQSNNKYAASSYLSLTPEQWKSH

SEQ ID NO: 749 - protein, 112 aa, Human
QSVLTQPPSVSGAPGQRVTISCTGSRSNIGAGYDVQWYQQVPGTAPKLLISGNSNRPSGVPDRFSGSKSGTSASLAITGLQAEDEADYYCQSYDSSLSGLRVFGGGTKLTVL

SEQ ID NO: 750 - protein, 14 aa, Human
TGSRSNIGAGYDVQ

SEQ ID NO: 751 - protein, 7 aa, Human
GNSNRPS

SEQ ID NO: 752 - protein, 12 aa, Human
QSYDSSLSGLRV

SEQ ID NO: 753 - protein, 22 aa, Human
QSVLTQPPSVSGAPGQRVTISC

SEQ ID NO: 754 - protein, 15 aa, Human
WYQQVPGTAPKLLIS

SEQ ID NO: 755 - protein, 32 aa, Human
GVPDRFSGSKSGTSASLAITGLQAEDEADYYC

SEQ ID NO: 756 - protein, 10 aa, Human
FGGGTKLTVL

SEQ ID NO: 757 - protein, 179 aa, Human
EVQLVQSGAEVKKPGESLKISCKGSGYSFTSYWIGWVRQMPGKGLEWMGIIYPGDSDTRYSPSFQGQVTISADKSITTAYLQWSSLKASDTAMYYCARTQTTNWFDSWGQGTLVTVSSASTKGPSVFPLAPSSKSTSGGTAALGCLVKDYFPEPVTVSWNSGALTSGVHTFPAVLQSSG

SEQ ID NO: 758 - protein, 118 aa, Human
EVQLVQSGAEVKKPGESLKISCKGSGYSFTSYWIGWVRQMPGKGLEWMGIIYPGDSDTRYSPSFQGQVTISADKSITTAYLQWSSLKASDTAMYYCARTQTTNWFDSWGQGTLVTVSS

SEQ ID NO: 759 - protein, 5 aa, Human
SYWIG

SEQ ID NO: 760 - protein, 17 aa, Human
IIYPGDSDTRYSPSFQG

SEQ ID NO: 761 - protein, 9 aa, Human
TQTTNWFDS

SEQ ID NO: 762 - protein, 30 aa, Human; identical to SEQ ID NO: 744

SEQ ID NO: 763 - protein, 14 aa, Human
WVRQMPGKGLEWMG

SEQ ID NO: 764 - protein, 32 aa, Human
QVTISADKSITTAYLQWSSLKASDTAMYYCAR

SEQ ID NO: 765 - protein, 11 aa, Human
WGQGTLVTVSS

SEQ ID NO: 766 - protein, 186 aa, Human
DIQMTQSPSTLSVSVGDRVTITCRASQSVSSWLAWYQQKPGKAPKLLIYDASSLESGVPSRFSGSGSGTEFTLTISSLQPDDFATYYCQQYNSFYTFGQGTKLEIKRTVAAPSVFIFPPSDEQLKSGTASVVCLLNNFYPREAKVQWKVDNALQSGNSQESVTEQDSKDSTYSLSSTLTLSKADYE

SEQ ID NO: 767 - protein, 106 aa, Human
DIQMTQSPSTLSVSVGDRVTITCRASQSVSSWLAWYQQKPGKAPKLLIYDASSLESGVPSRFSGSGSGTEFTLTISSLQPDDFATYYCQQYNSFYTFGQGTKLEIK

SEQ ID NO: 768 - protein, 11 aa, Human
RASQSVSSWLA

SEQ ID NO: 769 - protein, 7 aa, Human
DASSLES

SEQ ID NO: 770 - protein, 8 aa, Human
QQYNSFYT

SEQ ID NO: 771 - protein, 23 aa, Human
DIQMTQSPSTLSVSVGDRVTITC

SEQ ID NO: 772 - protein, 15 aa, Human
WYQQKPGKAPKLLIY

SEQ ID NO: 773 - protein, 32 aa, Human; identical to SEQ ID NO: 737

SEQ ID NO: 774 - protein, 10 aa, Human
FGQGTKLEIK

SEQ ID NO: 775 - protein, 189 aa, Human
QVQLVESGGGVVQPGGSLRLSCAASGFTFSSYGMHWVRQAPGKGLEWVTFTRYDGSNKFYADSVKGRFSISRDNSKNTLYLQMNSLRAEDTAVYYCAKESRVAFGGAIAIYYFGMDVWGQGTTVTVSSASTKGPSVFPLAPCSRSTSGGTAALGCLVKDYFPEPVTVSWNSGALTSGVHTFPAVLQSSG

SEQ ID NO: 776 - protein, 128 aa, Human
QVQLVESGGGVVQPGGSLRLSCAASGFTFSSYGMHWVRQAPGKGLEWVTFTRYDGSNKFYADSVKGRFSISRDNSKNTLYLQMNSLRAEDTAVYYCAKESRVAFGGAIAIYYFGMDVWGQGTTVTVSS

SEQ ID NO: 777 - protein, 5 aa, Human
SYGMH

SEQ ID NO: 778 - protein, 17 aa, Human
FTRYDGSNKFYADSVKG

SEQ ID NO: 779 - protein, 19 aa, Human
ESRVAFGGAIAIYYFGMDV

SEQ ID NO: 780 - protein, 30 aa, Human
QVQLVESGGGVVQPGGSLRLSCAASGFTFS

SEQ ID NO: 781 - protein, 14 aa, Human
WVRQAPGKGLEWVT

SEQ ID NO: 782 - protein, 32 aa, Human
RFSISRDNSKNTLYLQMNSLRAEDTAVYYCAK

SEQ ID NO: 783 - protein, 11 aa, Human
WGQGTTVTVSS

SEQ ID NO: 784 - protein, 193 aa, Human
DIVMTQSPLSLPVTPGEPASISCRSSQSLLHSNGYNYLDWYLQKPGQSPQLLIYLGSNRASGVPDRFSGSGSGTDFTLKISRVEAEDVGVYYCMQALQTPQYTFGQGTKLEIKRTVAAPSVFIFPPSDEQLKSGTASVVCLLNNFYPREAKVQWKVDNALQSGNSQESVTEQDSKDSTYSLSSTLTLSKADYE

SEQ ID NO: 785 - protein, 113 aa, Human
DIVMTQSPLSLPVTPGEPASISCRSSQSLLHSNGYNYLDWYLQKPGQSPQLLIYLGSNRASGVPDRFSGSGSGTDFTLKISRVEAEDVGVYYCMQALQTPQYTFGQGTKLEIK

SEQ ID NO: 786 - protein, 16 aa, Human
RSSQSLLHSNGYNYLD

SEQ ID NO: 787 - protein, 7 aa, Human
LGSNRAS

SEQ ID NO: 788 - protein, 10 aa, Human
MQALQTPQYT

SEQ ID NO: 789 - protein, 23 aa, Human
DIVMTQSPLSLPVTPGEPASISC

SEQ ID NO: 790 - protein, 15 aa, Human
WYLQKPGQSPQLLIY

SEQ ID NO: 791 - protein, 32 aa, Human; identical to SEQ ID NO: 323

SEQ ID NO: 792 - protein, 10 aa, Human
FGQGTKLEIK

SEQ ID NO: 793 - protein, 184 aa, Human
EVQLLESGGGLVQPGGSLRLSCAASGFTFSNYAMSWVRQAPGKGLEWVSAIRNSGSSTYYADSVKGRFTISRDNSKNTLYLQMNSLRAEDSAVYYCAKVGGTAAGHPFYDYWGQGTLVTVSSASTKGPSVFPLAPSSKSTSGGTAALGCLVKDYFPEPVTVSWNSGALTSGVHTFPAVLQSSGL

SEQ ID NO: 794 - protein, 122 aa, Human
EVQLLESGGGLVQPGGSLRLSCAASGFTFSNYAMSWVRQAPGKGLEWVSAIRNSGSSTYYADSVKGRFTISRDNSKNTLYLQMNSLRAEDSAVYYCAKVGGTAAGHPFYDYWGQGTLVTVSS

SEQ ID NO: 795 - protein, 5 aa, Human
NYAMS

SEQ ID NO: 796 - protein, 17 aa, Human
AIRNSGSSTYYADSVKG

SEQ ID NO: 797 - protein, 13 aa, Human
VGGTAAGHPFYDY

SEQ ID NO: 798 - protein, 30 aa, Human
EVQLLESGGGLVQPGGSLRLSCAASGFTFS

SEQ ID NO: 799 - protein, 14 aa, Human
WVRQAPGKGLEWVS

SEQ ID NO: 800 - protein, 32 aa, Human
RFTISRDNSKNTLYLQMNSLRAEDSAVYYCAK

SEQ ID NO: 801 - protein, 11 aa, Human
WGQGTLVTVSS

SEQ ID NO: 802 - protein, 186 aa, Human
DIQMTQSPSSLSASVGDRVTITCRASQSISNYLNWYQQKPGKAPDLLIYAASSLQSGVPLRFSGSGSGTDFTLTISSLQPEDFATYYCQQTYSAPTFGGGTKVEIKRTVAAPSVFIFPPSDEQLKSGTASVVCLLNNFYPREAKVQWKVDNALQSGNSQESVTEQDSKDSTYSLSSTLTLSKADYE

SEQ ID NO: 803 - protein, 106 aa, Human
DIQMTQSPSSLSASVGDRVTITCRASQSISNYLNWYQQKPGKAPDLLIYAASSLQSGVPLRFSGSGSGTDFTLTISSLQPEDFATYYCQQTYSAPTFGGGTKVEIK

SEQ ID NO: 804 - protein, 11 aa, Human
RASQSISNYLN

SEQ ID NO: 805 - protein, 7 aa, Human
AASSLQS

SEQ ID NO: 806 - protein, 8 aa, Human
QQTYSAPT

SEQ ID NO: 807 - protein, 23 aa, Human
DIQMTQSPSSLSASVGDRVTITC

SEQ ID NO: 808 - protein, 15 aa, Human
WYQQKPGKAPDLLIY

SEQ ID NO: 809 - protein, 32 aa, Human
GVPLRFSGSGSGTDFTLTISSLQPEDFATYYC

SEQ ID NO: 810 - protein, 10 aa, Human
FGGGTKVEIK

SEQ ID NO: 811 - protein, 181 aa, Human
QVQLVQSGAEVKKPGASVKVSCKASGYTFTGYYMHWVRQAPGQGLEWMGRINPNSGGTNFAQRFQGRVSMTRDTSISTAYMELSSLRSDDTAVYYCARGAKFEHLPFDIWGQGTMVTVSSASTKGPSVFPLAPSSKSTSGGTAALGCLVKDYFPEPVTVSWNSGALTSGVHTFPAVLQSSG

SEQ ID NO: 812 - protein, 120 aa, Human
QVQLVQSGAEVKKPGASVKVSCKASGYTFTGYYMHWVRQAPGQGLEWMGRINPNSGGTNFAQRFQGRVSMTRDTSISTAYMELSSLRSDDTAVYYCARGAKFEHLPFDIWGQGTMVTVSS

SEQ ID NO: 813 - protein, 5 aa, Human
GYYMH

SEQ ID NO: 814 - protein, 17 aa, Human
RINPNSGGTNFAQRFQG

SEQ ID NO: 815 - protein, 11 aa, Human
GAKFEHLPFDI

SEQ ID NO: 816 - protein, 30 aa, Human; identical to SEQ ID NO: 222

SEQ ID NO: 817 - protein, 14 aa, Human
WVRQAPGQGLEWMG

SEQ ID NO: 818 - protein, 32 aa, Human
RVSMTRDTSISTAYMELSSLRSDDTAVYYCAR

SEQ ID NO: 819 - protein, 11 aa, Human
WGQGTMVTVSS

SEQ ID NO: 820 - protein, 178 aa, Human
QSMLTQPPSASGTPGQRVTISCSGSSSNIGSNYVYWYQQLPGTAPKLLIYRNNQRPSGVPDRFSGSKSGTSASLAISGLRSEDEADYYCAAWDDRRWVFGGGTKLTVLGQPKAAPSVTLFPPSSEELQANKATLVCLISDFYPGAVTVAWKADSSPVKAGVETTTPSKQSNNKYAASS

SEQ ID NO: 821 - protein, 108 aa, Human
QSMLTQPPSASGTPGQRVTISCSGSSSNIGSNYVYWYQQLPGTAPKLLIYRNNQRPSGVPDRFSGSKSGTSASLAISGLRSEDEADYYCAAWDDRRWVFGGGTKLTVL

SEQ ID NO: 822 - protein, 13 aa, Human
SGSSSNIGSNYVY

SEQ ID NO: 823 - protein, 7 aa, Human
RNNQRPS

SEQ ID NO: 824 - protein, 9 aa, Human
AAWDDRRWV

SEQ ID NO: 825 - protein, 22 aa, Human
QSMLTQPPSASGTPGQRVTISC

SEQ ID NO: 826 - protein, 15 aa, Human
WYQQLPGTAPKLLIY

SEQ ID NO: 827 - protein, 32 aa, Human; identical to SEQ ID NO: 539

SEQ ID NO: 828 - protein, 10 aa, Human
FGGGTKLTVL

SEQ ID NO: 829 - protein, 186 aa, Human
QVQLVQSGAEVKKPGASVKVSCKSSGYTFTGYYMHWVRQAPGQGLEWMGRINPNSGGTNYAQKFQGRVTMTRDTSISTAYMELSRLRSDDTAVYYCARGARGGAGCSGWSCFDFWGQGTLVTVSSASTKGPSVFPLAPSSKSTSGGTAALGCLVKDYFPEPVTVSWNSGALTSGVHTFPAVLQSSG

SEQ ID NO: 830 - protein, 125 aa, Human
QVQLVQSGAEVKKPGASVKVSCKSSGYTFTGYYMHWVRQAPGQGLEWMGRINPNSGGTNYAQKFQGRVTMTRDTSISTAYMELSRLRSDDTAVYYCARGARGGAGCSGWSCFDFWGQGTLVTVSS

SEQ ID NO: 831 - protein, 5 aa, Human
GYYMH

SEQ ID NO: 832 - protein, 17 aa, Human
RINPNSGGTNYAQKFQG

SEQ ID NO: 833 - protein, 16 aa, Human
GARGGAGCSGWSCFDF

SEQ ID NO: 834 - protein, 30 aa, Human
QVQLVQSGAEVKKPGASVKVSCKSSGYTFT

SEQ ID NO: 835 - protein, 14 aa, Human
WVRQAPGQGLEWMG

SEQ ID NO: 836 - protein, 32 aa, Human
RVTMTRDTSISTAYMELSRLRSDDTAVYYCAR

SEQ ID NO: 837 - protein, 11 aa, Human
WGQGTLVTVSS

SEQ ID NO: 838 - protein, 194 aa, Human
QSALTQPRSVSGSPGQSVTISCTGTSSDVGGYKYVSWYQQHPGKAPKLMIYDVSKRPSGVPDRFSGSKSGNTASLTISGLQAEDEGDYYCCSYAGTYSLVFGGGTKVTVTVLGQPKAAPSVTLFPPSSEELQANKATLVCLISDFYPGAVTVAWKADSSPVKAGVETTTPSKQSNNKYAASSYLSLTPEQWKSH

SEQ ID NO: 839 - protein, 109 aa, Human
QSALTQPRSVSGSPGQSVTISCTGTSSDVGGYKYVSWYQQHPGKAPKLMIYDVSKRPSGVPDRFSGSKSGNTASLTISGLQAEDEGDYYCCSYAGTYSLVFGGGTKVTV

SEQ ID NO: 840 - protein, 14 aa, Human
TGTSSDVGGYKYVS

SEQ ID NO: 841 - protein, 7 aa, Human
DVSKRPS

SEQ ID NO: 842 - protein, 10 aa, Human
CSYAGTYSLV

SEQ ID NO: 843 - protein, 22 aa, Human
QSALTQPRSVSGSPGQSVTISC

SEQ ID NO: 844 - protein, 15 aa, Human
WYQQHPGKAPKLMIY

SEQ ID NO: 845 - protein, 32 aa, Human
GVPDRFSGSKSGNTASLTISGLQAEDEGDYYC

SEQ ID NO: 846 - protein, 9 aa, Human
FGGGTKVTV

SEQ ID NO: 847 - protein, 183 aa, Human
EVQLVESGGGLVKPGGSLRLSCAASGFTFSDYTMNWVRQAPGKGLEWVSSITRSSTYIYYADSVKGRFTISRDNAKNSLYLQMNSLRAEDTAVYYCARDPYYDILTGYWNYWGQGTLVTVSSASTKGPSVFPLAPSSKSTSGGTAALGCLVKDYFPEPVTVSWNSGALTSGVHTFPAVLQSSG

SEQ ID NO: 848 - protein, 122 aa, Human
EVQLVESGGGLVKPGGSLRLSCAASGFTFSDYTMNWVRQAPGKGLEWVSSITRSSTYIYYADSVKGRFTISRDNAKNSLYLQMNSLRAEDTAVYYCARDPYYDILTGYWNYWGQGTLVTVSS

SEQ ID NO: 849 - protein, 5 aa, Human
DYTMN

SEQ ID NO: 850 - protein, 17 aa, Human
SITRSSTYIYYADSVKG

SEQ ID NO: 851 - protein, 13 aa, Human
DPYYDILTGYWNY

SEQ ID NO: 852 - protein, 30 aa, Human
EVQLVESGGGLVKPGGSLRLSCAASGFTFS

SEQ ID NO: 853 - protein, 14 aa, Human
WVRQAPGKGLEWVS

SEQ ID NO: 854 - protein, 32 aa, Human; identical to SEQ ID NO: 332

SEQ ID NO: 855 - protein, 11 aa, Human
WGQGTLVTVSS

SEQ ID NO: 856 - protein, 189 aa, Human
EIVLTQSPGTLSLSPGERATLSCRASQSLSSSYLAWYQQKPGQSPRLLIYGASSRATGIPDRFSGSGSGTDFTLTINRLEPEDFAVYYCQQYRTSPRGTFGGGTKVEIKRTVAAPSVFIFPPSDEQLKSGTASVVCLLNNFYPREAKVQWKVDNALQSGNSQESVTEQDSKDSTYSLSSTLTLSKADYE

SEQ ID NO: 857 - protein, 109 aa, Human
EIVLTQSPGTLSLSPGERATLSCRASQSLSSSYLAWYQQKPGQSPRLLIYGASSRATGIPDRFSGSGSGTDFTLTINRLEPEDFAVYYCQQYRTSPRGTFGGGTKVEIK

SEQ ID NO: 858 - protein, 12 aa, Human
RASQSLSSSYLA

SEQ ID NO: 859 - protein, 7 aa, Human
GASSRAT

SEQ ID NO: 860 - protein, 10 aa, Human
QQYRTSPRGT

SEQ ID NO: 861 - protein, 23 aa, Human
EIVLTQSPGTLSLSPGERATLSC

SEQ ID NO: 862 - protein, 15 aa, Human
WYQQKPGQSPRLLIY

SEQ ID NO: 863 - protein, 32 aa, Human; identical to SEQ ID NO: 161

SEQ ID NO: 864 - protein, 10 aa, Human
FGGGTKVEIK

SEQ ID NO: 865 - protein, 183 aa, Human
EVQLVESGGGLVQPGGSLRLSCAASGFTFSSYAMSWVRQAPGKGLEWVSSIRGSGGSTYYADSVKGRFTISRDNSKYTLYLQMNSLRAEDTAVYYCAKITGAVGGENWFDPWGQGTLVTVSSASTKGPSVFPLAPCSRSTSGGTAALGCLVKDYFPEPVTVSWNSGALTSGVHTFPAVLQSSG

SEQ ID NO: 866 - protein, 122 aa, Human
EVQLVESGGGLVQPGGSLRLSCAASGFTFSSYAMSWVRQAPGKGLEWVSSIRGSGGSTYYADSVKGRFTISRDNSKYTLYLQMNSLRAEDTAVYYCAKITGAVGGENWFDPWGQGTLVTVSS

SEQ ID NO: 867 - protein, 5 aa, Human
SYAMS

SEQ ID NO: 868 - protein, 17 aa, Human
SIRGSGGSTYYADSVKG

SEQ ID NO: 869 - protein, 13 aa, Human
ITGAVGGENWFDP

SEQ ID NO: 870 - protein, 30 aa, Human
EVQLVESGGGLVQPGGSLRLSCAASGFTFS

SEQ ID NO: 871 - protein, 14 aa, Human
WVRQAPGKGLEWVS

SEQ ID NO: 872 - protein, 32 aa, Human
RFTISRDNSKYTLYLQMNSLRAEDTAVYYCAK

SEQ ID NO: 873 - protein, 11 aa, Human
WGQGTLVTVSS

SEQ ID NO: 874 - protein, 187 aa, Human
DIQMTQSPSSLSASVGDRVTITCRASQSISSYLNWYQQKPGKAPKLLIYAASSLQSGVPSRFSGSGSGTDFTLTISSLQPEDFAIYYCQQTSRTPLTFGGGTKVEVKRTVAAPSVFIFPPSDEQLKSGTASVVCLLNNFYPREAKVQWKVDNALQSGNSQESVTEQDSKDSTYSLSSTLTLSKADYE

SEQ ID NO: 875 - protein, 107 aa, Human
DIQMTQSPSSLSASVGDRVTITCRASQSISSYLNWYQQKPGKAPKLLIYAASSLQSGVPSRFSGSGSGTDFTLTISSLQPEDFAIYYCQQTSRTPLTFGGGTKVEVK

SEQ ID NO: 876 - protein, 11 aa, Human
RASQSISSYLN

SEQ ID NO: 877 - protein, 7 aa, Human
AASSLQS

SEQ ID NO: 878 - protein, 9 aa, Human
QQTSRTPLT

SEQ ID NO: 879 - protein, 23 aa, Human
DIQMTQSPSSLSASVGDRVTITC

SEQ ID NO: 880 - protein, 15 aa, Human
WYQQKPGKAPKLLIY

SEQ ID NO: 881 - protein, 32 aa, Human
GVPSRFSGSGSGTDFTLTISSLQPEDFAIYYC

SEQ ID NO: 882 - protein, 10 aa, Human
FGGGTKVEVK

SEQ ID NO: 883 - protein, 177 aa, Human
EVRLVQSGGGLVKPGGSLRLSCAASGFTFSTAWVRWVRQAPGKGLECVGRIKSKNDGDRAEYAAPARGRFIISRDDAENILYLQMNNLKTEDTAFYYCTTDQGNSSAFYSADYWGQGTLVTVSSASPTSPKVFPLSLDSTPQDGNVVVACLVQGFFPQEPLSVTWSESGQNVTARNF

SEQ ID NO: 884 - protein, 124 aa, Human
EVRLVQSGGGLVKPGGSLRLSCAASGFTFSTAWVRWVRQAPGKGLECVGRIKSKNDGDRAEYAAPARGRFIISRDDAENILYLQMNNLKTEDTAFYYCTTDQGNSSAFYSADYWGQGTLVTVSS

SEQ ID NO: 885 - protein, 5 aa, Human
TAWVR

SEQ ID NO: 886 - protein, 19 aa, Human
RIKSKNDGDRAEYAAPARG

SEQ ID NO: 887 - protein, 13 aa, Human
DQGNSSAFYSADY

SEQ ID NO: 888 - protein, 30 aa, Human
EVRLVQSGGGLVKPGGSLRLSCAASGFTFS

SEQ ID NO: 889 - protein, 14 aa, Human
WVRQAPGKGLECVG

SEQ ID NO: 890 - protein, 32 aa, Human
RFIISRDDAENILYLQMNNLKTEDTAFYYCTT

SEQ ID NO: 891 - protein, 11 aa, Human
WGQGTLVTVSS

SEQ ID NO: 892 - protein, 187 aa, Human
DIQMTQSPSAMSASVGDRVTITCRASQDINTFLTWFQQKPGKVPQRLIFAAYRLQSGVPSRFSGSGSGTEFTLTINSLQPEDVATYYCLHHKTYPYTFGQGTKLEIKRTVAAPSVFIFPPSDEQLKSGTASVVCLLNNFYPREAKVQWKVDNALQSGNSQESVTEQDSKDSTYSLSSTLTLSKADYE

SEQ ID NO: 893 - protein, 107 aa, Human
DIQMTQSPSAMSASVGDRVTITCRASQDINTFLTWFQQKPGKVPQRLIFAAYRLQSGVPSRFSGSGSGTEFTLTINSLQPEDVATYYCLHHKTYPYTFGQGTKLEIK

SEQ ID NO: 894 - protein, 11 aa, Human
RASQDINTFLT

SEQ ID NO: 895 - protein, 7 aa, Human
AAYRLQS

SEQ ID NO: 896 - protein, 9 aa, Human
LHHKTYPYT

SEQ ID NO: 897 - protein, 23 aa, Human
DIQMTQSPSAMSASVGDRVTITC

SEQ ID NO: 898 - protein, 15 aa, Human
WFQQKPGKVPQRLIF

SEQ ID NO: 899 - protein, 32 aa, Human
GVPSRFSGSGSGTEFTLTINSLQPEDVATYYC

SEQ ID NO: 900 - protein, 10 aa, Human
FGQGTKLEIK

SEQ ID NO: 901 - protein, 179 aa, Human
EVQLVQSGAEVKKPGESLKISCKGSGYRFTRYWIGWVRQMPGKGLEWMGIIYLGDSETRYSPSFQGQVTISADNSISTAYLQWSSLKASDTAMYYCARSSNWNYGDYWGQGTLVTVSSASTKGPSVFPLAPCSRSTSGGTAALGCLVKDYFPEPVTVSWNSGALTSGVHTFPAVLQSSG

SEQ ID NO: 902 - protein, 118 aa, Human
EVQLVQSGAEVKKPGESLKISCKGSGYRFTRYWIGWVRQMPGKGLEWMGIIYLGDSETRYSPSFQGQVTISADNSISTAYLQWSSLKASDTAMYYCARSSNWNYGDYWGQGTLVTVSS

SEQ ID NO: 903 - protein, 5 aa, Human
RYWIG

SEQ ID NO: 904 - protein, 17 aa, Human
IIYLGDSETRYSPSFQG

SEQ ID NO: 905 - protein, 9 aa, Human
SSNWNYGDY

SEQ ID NO: 906 - protein, 30 aa, Human
EVQLVQSGAEVKKPGESLKISCKGSGYRFT

SEQ ID NO: 907 - protein, 14 aa, Human
WVRQMPGKGLEWMG

SEQ ID NO: 908 - protein, 32 aa, Human
QVTISADNSISTAYLQWSSLKASDTAMYYCAR

SEQ ID NO: 909 - protein, 11 aa, Human
WGQGTLVTVSS

SEQ ID NO: 910 - protein, 187 aa, Human
DIQMTQSPSTLSASVGDRVTITCRASQSITSWLAWYQQKSGKAPKLLIYDASSLESGVPSRFSGSGSGTEFTLTISSLQPDDFATYYCQQYNSYPWTFGQGTKVEIKRTVAAPSVFIFPPSDEQLKSGTASVVCLLNNFYPREAKVQWKVDNALQSGNSQESVTEQDSKDSTYSLSSTLTLSKADYE

SEQ ID NO: 911 - protein, 107 aa, Human
DIQMTQSPSTLSASVGDRVTITCRASQSITSWLAWYQQKSGKAPKLLIYDASSLESGVPSRFSGSGSGTEFTLTISSLQPDDFATYYCQQYNSYPWTFGQGTKVEIK

SEQ ID NO: 912 - protein, 11 aa, Human
RASQSITSWLA

SEQ ID NO: 913 - protein, 7 aa, Human
DASSLES

SEQ ID NO: 914 - protein, 9 aa, Human
QQYNSYPWT

SEQ ID NO: 915 - protein, 23 aa, Human
DIQMTQSPSTLSASVGDRVTITC

SEQ ID NO: 916 - protein, 15 aa, Human
WYQQKSGKAPKLLIY

SEQ ID NO: 917 - protein, 32 aa, Human; identical to SEQ ID NO: 737

SEQ ID NO: 918 - protein, 10 aa, Human
FGQGTKVEIK

SEQ ID NO: 919 - protein, 185 aa, Human
QVQLQESGPGLVKPSETLSLTCTVSGGSISSDYWSWIRQPPGKGLEWIGYMYYSGSTNYNPSLKSRVTISVDTSKNQFSLKLSSVTAADTAVYYCARWDRGSRPHYYYYGMDVWGQGTTVTVSSASTKGPSVFPLAPSSKSTSGGTAALGCLVKDYFPEPVTVSWNSGALTSGVHTFPAVLQSSG

SEQ ID NO: 920 - protein, 124 aa, Human
QVQLQESGPGLVKPSETLSLTCTVSGGSISSDYWSWIRQPPGKGLEWIGYMYYSGSTNYNPSLKSRVTISVDTSKNQFSLKLSSVTAADTAVYYCARWDRGSRPHYYYYGMDVWGQGTTVTVSS

SEQ ID NO: 921 - protein, 5 aa, Human
SDYWS

SEQ ID NO: 922 - protein, 16 aa, Human
YMYYSGSTNYNPSLKS

SEQ ID NO: 923 - protein, 16 aa, Human
WDRGSRPHYYYYGMDV

SEQ ID NO: 924 - protein, 30 aa, Human; identical to SEQ ID NO: 24

SEQ ID NO: 925 - protein, 14 aa, Human
WIRQPPGKGLEWIG

SEQ ID NO: 926 - protein, 32 aa, Human; identical to SEQ ID NO: 134

SEQ ID NO: 927 - protein, 11 aa, Human
WGQGTTVTVSS

SEQ ID NO: 928 - protein, 191 aa, Human
DIVMTQSPLSLPVTPGEPASISCRSSQSLLHSNGYNYLDWYLQKPGQSPQLLIYLGSNRASGVPDRFSGSASGTDFTLKISRVEAEDVGVYYCMQALQAFTFGPGTKVDIKRTVAAPSVFIFPPSDEQLKSGTASVVCLLNNFYPREAKVQWKVDNALQSGNSQESVTEQDSKDSTYSLSSTLTLSKADYE

SEQ ID NO: 929 - protein, 111 aa, Human
DIVMTQSPLSLPVTPGEPASISCRSSQSLLHSNGYNYLDWYLQKPGQSPQLLIYLGSNRASGVPDRFSGSASGTDFTLKISRVEAEDVGVYYCMQALQAFTFGPGTKVDIK

SEQ ID NO: 930 - protein, 16 aa, Human
RSSQSLLHSNGYNYLD

SEQ ID NO: 931 - protein, 7 aa, Human
LGSNRAS

SEQ ID NO: 932 - protein, 8 aa, Human
MQALQAFT

SEQ ID NO: 933 - protein, 23 aa, Human
DIVMTQSPLSLPVTPGEPASISC

SEQ ID NO: 934 - protein, 15 aa, Human
WYLQKPGQSPQLLIY

SEQ ID NO: 935 - protein, 32 aa, Human
GVPDRFSGSASGTDFTLKISRVEAEDVGVYYC

SEQ ID NO: 936 - protein, 10 aa, Human
FGPGTKVDIK

SEQ ID NO: 937 - protein, 214 aa, Human
EVQLVQSGAEVKKPGESLKISCKGSAYTFTTYWIGWVRQMPGKGLEWMGIIYPGDSDTRYSPSFQGQVTISADKSISTAYLQWSSLKASDTAMYYCARLLLVAGPFDYWGQGTLVTVSSASTKGPSVFPLAPSSKSTSGGTAALGCLVKDYFPEPVTVSWNSGALTSGVHTFPAVLQSSGLYSLSSVVTVPSSSLGTQTYICNVNHKPSNTKVD

SEQ ID NO: 938 - protein, 119 aa, Human
EVQLVQSGAEVKKPGESLKISCKGSAYTFTTYWIGWVRQMPGKGLEWMGIIYPGDSDTRYSPSFQGQVTISADKSISTAYLQWSSLKASDTAMYYCARLLLVAGPFDYWGQGTLVTVSS

SEQ ID NO: 939 - protein, 5 aa, Human
TYWIG

SEQ ID NO: 940 - protein, 17 aa, Human
IIYPGDSDTRYSPSFQG

SEQ ID NO: 941 - protein, 10 aa, Human
LLLVAGPFDY

SEQ ID NO: 942 - protein, 30 aa, Human
EVQLVQSGAEVKKPGESLKISCKGSAYTFT

SEQ ID NO: 943 - protein, 14 aa, Human
WVRQMPGKGLEWMG

SEQ ID NO: 944 - protein, 32 aa, Human
QVTISADKSISTAYLQWSSLKASDTAMYYCAR

SEQ ID NO: 945 - protein, 11 aa, Human
WGQGTLVTVSS

SEQ ID NO: 946 - protein, 152 aa, Human
DIQMTQSPSTLSASVGDRVTITCRASQSISSWLAWYQQKPGKAPNLLIYDASSLESGVPSRFSGSGSGTEFTLTISSLQPDDFATYYCQQYNSYPWTFGQGTKVEIKRTVAAPSVFIFPPSDEQLKSGTASVVCLLNNFYPREAKVQWKVDN

SEQ ID NO: 947 - protein, 107 aa, Human
DIQMTQSPSTLSASVGDRVTITCRASQSISSWLAWYQQKPGKAPNLLIYDASSLESGVPSRFSGSGSGTEFTLTISSLQPDDFATYYCQQYNSYPWTFGQGTKVEIK

SEQ ID NO: 948 - protein, 11 aa, Human
RASQSISSWLA

SEQ ID NO: 949 - protein, 7 aa, Human
DASSLES

SEQ ID NO: 950 - protein, 9 aa, Human
QQYNSYPWT

SEQ ID NO: 951 - protein, 23 aa, Human
DIQMTQSPSTLSASVGDRVTITC

SEQ ID NO: 952 - protein, 15 aa, Human
WYQQKPGKAPNLLIY

SEQ ID NO: 953 - protein, 32 aa, Human; identical to SEQ ID NO: 737

SEQ ID NO: 954 - protein, 10 aa, Human
FGQGTKVEIK

SEQ ID NO: 955 - protein, 184 aa, Human
QVQLLQSGAEVKKPGASVKVSCKASGYTFTGYYMHWVRQAPGQGLEWMGRINPNSGGTNYAQKFQGRVTMTRDTSISTAYMELSRLTSDDTAVYYCATKTGIDRYYYYYMDVWGKGTTVTVSSASTKGPSVFPLAPSSKSTSGGTAALGCLVKDYFPEPVTVSWNSGALTSGVHTFPAVLQSSG

SEQ ID NO: 956 - protein, 123 aa, Human
QVQLLQSGAEVKKPGASVKVSCKASGYTFTGYYMHWVRQAPGQGLEWMGRINPNSGGTNYAQKFQGRVTMTRDTSISTAYMELSRLTSDDTAVYYCATKTGIDRYYYYYMDVWGKGTTVTVSS

SEQ ID NO: 957 - protein, 5 aa, Human
GYYMH

SEQ ID NO: 958 - protein, 17 aa, Human
RINPNSGGTNYAQKFQG

SEQ ID NO: 959 - protein, 14 aa, Human
KTGIDRYYYYYMDV

SEQ ID NO: 960 - protein, 30 aa, Human
QVQLLQSGAEVKKPGASVKVSCKASGYTFT

SEQ ID NO: 961 - protein, 14 aa, Human
WVRQAPGQGLEWMG

SEQ ID NO: 962 - protein, 32 aa, Human
RVTMTRDTSISTAYMELSRLTSDDTAVYYCAT

SEQ ID NO: 963 - protein, 11 aa, Human
WGKGTTVTVSS

SEQ ID NO: 964 - protein, 181 aa, Human
QSVLTQPPSVSEAPGQRVTISCTGSSSNIGAGYDVHWYQQLPGTAPKLLIYGNINRPSGVPDRFSGSKSGTSASLAITGLQAEDEADYYCQSYDNSLNGSVFGGGTKLTVLRQPKAAPSVTLFPPSSEELQANKATLVCLISDFYPGAVTVAWKADSSPVKAGVETTTPSKQSNNKYAASS

SEQ ID NO: 965 - protein, 111 aa, Human
QSVLTQPPSVSEAPGQRVTISCTGSSSNIGAGYDVHWYQQLPGTAPKLLIYGNINRPSGVPDRFSGSKSGTSASLAITGLQAEDEADYYCQSYDNSLNGSVFGGGTKLTVL

SEQ ID NO: 966 - protein, 14 aa, Human
TGSSSNIGAGYDVH

SEQ ID NO: 967 - protein, 7 aa, Human
GNINRPS

SEQ ID NO: 968 - protein, 11 aa, Human
QSYDNSLNGSV

SEQ ID NO: 969 - protein, 22 aa, Human
QSVLTQPPSVSEAPGQRVTISC

SEQ ID NO: 970 - protein, 15 aa, Human
WYQQLPGTAPKLLIY

SEQ ID NO: 971 - protein, 32 aa, Human; identical to SEQ ID NO: 755

SEQ ID NO: 972 - protein, 10 aa, Human
FGGGTKLTVL

SEQ ID NO: 973 - protein, 171 aa, Human
QVQLQESGPGLVKPSETLSLTCSVSGGSISDYYWSWIRQPPGKGLEWIGYIYNSGSTNYNPSLKSRVTISADPSKNQFSLKLSSVTAADTAVYYCARPHGGDYAFDIWGQGTMVTVSSASPTSPKVFPLSLDSTPQDGNVVVACLVQGFFPQEPLSVTWSESGQNVTARNF

SEQ ID NO: 974 - protein, 118 aa, Human
QVQLQESGPGLVKPSETLSLTCSVSGGSISDYYWSWIRQPPGKGLEWIGYIYNSGSTNYNPSLKSRVTISADPSKNQFSLKLSSVTAADTAVYYCARPHGGDYAFDIWGQGTMVTVSS

SEQ ID NO: 975 - protein, 5 aa, Human
DYYWS

SEQ ID NO: 976 - protein, 16 aa, Human
YIYNSGSTNYNPSLKS

SEQ ID NO: 977 - protein, 10 aa, Human
PHGGDYAFDI

SEQ ID NO: 978 - protein, 30 aa, Human
QVQLQESGPGLVKPSETLSLTCSVSGGSIS

SEQ ID NO: 979 - protein, 14 aa, Human
WIRQPPGKGLEWIG

SEQ ID NO: 980 - protein, 32 aa, Human
RVTISADPSKNQFSLKLSSVTAADTAVYYCAR

SEQ ID NO: 981 - protein, 11 aa, Human
WGQGTMVTVSS

SEQ ID NO: 982 - protein, 188 aa, Human
EIVLTQSPGTLSLSPGERATLSCRASQSVSSNFLAWYQQKPGQPPRLLIYGASVRATGIPDRFSGSGSGTDFTLTITRLEPEDFAVYYCQQYGSLPRTFGQGTKVEIKRTVAAPSVFIFPPSDEQLKSGTASVVCLLNNFYPREAKVQWKVDNALQSGNSQESVTEQDSKDSTYSLSSTLTLSKADYE

SEQ ID NO: 983 - protein, 108 aa, Human
EIVLTQSPGTLSLSPGERATLSCRASQSVSSNFLAWYQQKPGQPPRLLIYGASVRATGIPDRFSGSGSGTDFTLTITRLEPEDFAVYYCQQYGSLPRTFGQGTKVEIK

SEQ ID NO: 984 - protein, 12 aa, Human
RASQSVSSNFLA

SEQ ID NO: 985 - protein, 7 aa, Human
GASVRAT

SEQ ID NO: 986 - protein, 9 aa, Human
QQYGSLPRT

SEQ ID NO: 987 - protein, 23 aa, Human
EIVLTQSPGTLSLSPGERATLSC

SEQ ID NO: 988 - protein, 15 aa, Human
WYQQKPGQPPRLLIY

SEQ ID NO: 989 - protein, 32 aa, Human
GIPDRFSGSGSGTDFTLTITRLEPEDFAVYYC

SEQ ID NO: 990 - protein, 10 aa, Human
FGQGTKVEIK

SEQ ID NO: 991 - protein, 184 aa, Human
QVQLVQSGAEVMKPGSSVKVSCKASGGTFSSYSITWVRQAPGQGLEWMGRIIPILGIANYAQKFQGRVTITADKSTSTAYMELSSLRSEDTAVYYCARGYSGSPSNLDGMDVWGQGTTVTVSSASTKGPSVFPLAPSSKSTSGGTAALGCLVKDYFPEPVTVSWNSGALTSGVHTFPAVLQSSG

SEQ ID NO: 992 - protein, 123 aa, Human
QVQLVQSGAEVMKPGSSVKVSCKASGGTFSSYSITWVRQAPGQGLEWMGRIIPILGIANYAQKFQGRVTITADKSTSTAYMELSSLRSEDTAVYYCARGYSGSPSNLDGMDVWGQGTTVTVSS

SEQ ID NO: 993 - protein, 5 aa, Human
SYSIT

SEQ ID NO: 994 - protein, 17 aa, Human
RIIPILGIANYAQKFQG

SEQ ID NO: 995 - protein, 14 aa, Human
GYSGSPSNLDGMDV

SEQ ID NO: 996 - protein, 30 aa, Human
QVQLVQSGAEVMKPGSSVKVSCKASGGTFS

SEQ ID NO: 997 - protein, 14 aa, Human
WVRQAPGQGLEWMG

SEQ ID NO: 998 - protein, 32 aa, Human; identical to SEQ ID NO: 188

SEQ ID NO: 999 - protein, 11 aa, Human
WGQGTTVTVSS

SEQ ID NO: 1000 - protein, 187 aa, Human
IQMTQSPSTLSASVGDRVTITCRASQSISSWLAWYQQKPGKAPKLLIYDASSLQSGVPSRFSGSGSGTEFTLTISSLQPDDFATYYCQQYNSYSPITFGQGTRLEIKRTVAAPSVFIFPPSDEQLKSGTASVVCLLNNFYPREAKVQWKVDNALQSGNSQESVTEQDSKDSTYSLSSTLTLSKADYE

SEQ ID NO: 1001 - protein, 107 aa, Human
IQMTQSPSTLSASVGDRVTITCRASQSISSWLAWYQQKPGKAPKLLIYDASSLQSGVPSRFSGSGSGTEFTLTISSLQPDDFATYYCQQYNSYSPITFGQGTRLEIK

SEQ ID NO: 1002 - protein, 11 aa, Human
RASQSISSWLA

SEQ ID NO: 1003 - protein, 7 aa, Human
DASSLQS

SEQ ID NO: 1004 - protein, 10 aa, Human
QQYNSYSPIT

SEQ ID NO: 1005 - protein, 22 aa, Human
IQMTQSPSTLSASVGDRVTITC

SEQ ID NO: 1006 - protein, 15 aa, Human
WYQQKPGKAPKLLIY

SEQ ID NO: 1007 - protein, 32 aa, Human; identical to SEQ ID NO: 737

SEQ ID NO: 1008 - protein, 10 aa, Human
FGQGTRLEIK

SEQ ID NO: 1009 - protein, 190 aa, Human
QLQLQESGPGLVKPSETLSLTCTVSGGSISSSSYYWGWIRQPPGKGLEWIGSIYYSGSTYYNPSLKSRFTISVDTSKNQFSLKLSSVTAADTAVYYCAAYQRKLGYCRGNSCFSCFDPWGQGTLVTVSSASTKGPSVFPLAPSSKSTSGGTAALGCLVKDYFPEPVTVSWNSGALTSGVHTFPAVLQSSG

SEQ ID NO: 1010 - protein, 129 aa, Human
QLQLQESGPGLVKPSETLSLTCTVSGGSISSSSYYWGWIRQPPGKGLEWIGSIYYSGSTYYNPSLKSRFTISVDTSKNQFSLKLSSVTAADTAVYYCAAYQRKLGYCRGNSCFSCFDPWGQGTLVTVSS

SEQ ID NO: 1011 - protein, 7 aa, Human
SSSYYWG

SEQ ID NO: 1012 - protein, 16 aa, Human
SIYYSGSTYYNPSLKS

SEQ ID NO: 1013 - protein, 19 aa, Human
YQRKLGYCRGNSCFSCFDP

SEQ ID NO: 1014 - protein, 30 aa, Human; identical to SEQ ID NO: 294

SEQ ID NO: 1015 - protein, 14 aa, Human
WIRQPPGKGLEWIG

SEQ ID NO: 1016 - protein, 32 aa, Human
RFTISVDTSKNQFSLKLSSVTAADTAVYYCAA

SEQ ID NO: 1017 - protein, 11 aa, Human
WGQGTLVTVSS

SEQ ID NO: 1018 - protein, 188 aa, Human
SYELTQPPSVSVSPGQTASITCSGDKLGDKYACWYQQKPGQSPVLVIYQDTKRPSGIPERFSGSNSGNTATLTISGTQAMDEADYYCQAWDSSTVLFGGGTKLTVLGQPKAAPSVTLFPPSSEELQANKATLVCLISDFYPGAVTVAWKADSSPVKAGVETTTPSKQSNNKYAASSYLSLTPEQWKSH

SEQ ID NO: 1019 - protein, 106 aa, Human
SYELTQPPSVSVSPGQTASITCSGDKLGDKYACWYQQKPGQSPVLVIYQDTKRPSGIPERFSGSNSGNTATLTISGTQAMDEADYYCQAWDSSTVLFGGGTKLTVL

SEQ ID NO: 1020 - protein, 11 aa, Human
SGDKLGDKYAC

SEQ ID NO: 1021 - protein, 7 aa, Human
QDTKRPS

SEQ ID NO: 1022 - protein, 9 aa, Human
QAWDSSTVL

SEQ ID NO: 1023 - protein, 22 aa, Human
SYELTQPPSVSVSPGQTASITC

SEQ ID NO: 1024 - protein, 15 aa, Human
WYQQKPGQSPVLVIY

SEQ ID NO: 1025 - protein, 32 aa, Human; identical to SEQ ID NO: 467

SEQ ID NO: 1026 - protein, 10 aa, Human
FGGGTKLTVL

SEQ ID NO: 1027 - protein, 183 aa, Human
EVHLVQSGAEVKQPGESLKISCKGSGYNFATYWIAWVRQMPGKGLEWMGIIYPGDSDTRYSPSFQGQVIISADKSIGTAFLQWSSLKASDTAMYYCARRGYSSSNYRVDEYYYYGMDVWGQGTTVTVSSASPTSPKVFPLSLCSTQPDGNVVIACLVQGFFPQEPLSVTWSESGQGVTARNFP

SEQ ID NO: 1028 - protein, 129 aa, Human
EVHLVQSGAEVKQPGESLKISCKGSGYNFATYWIAWVRQMPGKGLEWMGIIYPGDSDTRYSPSFQGQVIISADKSIGTAFLQWSSLKASDTAMYYCARRGYSSSNYRVDEYYYYGMDVWGQGTTVTVSS

SEQ ID NO: 1029 - protein, 5 aa, Human
TYWIA

SEQ ID NO: 1030 - protein, 17 aa, Human
IIYPGDSDTRYSPSFQG

SEQ ID NO: 1031 - protein, 20 aa, Human
RGYSSSNYRVDEYYYYGMDV

SEQ ID NO: 1032 - protein, 30 aa, Human
EVHLVQSGAEVKQPGESLKISCKGSGYNFA

SEQ ID NO: 1033 - protein, 14 aa, Human
WVRQMPGKGLEWMG

SEQ ID NO: 1034 - protein, 32 aa, Human
QVIISADKSIGTAFLQWSSLKASDTAMYYCAR

SEQ ID NO: 1035 - protein, 11 aa, Human
WGQGTTVTVSS

SEQ ID NO: 1036 - protein, 186 aa, Human
QSVLTQPPSMSGAPGQRVTISCTGSSSNIGAGYDVHWYQQLPGAAPKLLIYGDTSRPSGVPDRFSGSKSDTSASLAITGLQAEDEADYYCQSFDRSLSGLVIFGGGTRLTVLGQPKAAPSVTLFPPSSEELQANKATLVCLISDFYPGAVTVAWKADSSPVKAGVETTTPSKQSNNKYAASSDRKS

SEQ ID NO: 1037 - protein, 112 aa, Human
QSVLTQPPSMSGAPGQRVTISCTGSSSNIGAGYDVHWYQQLPGAAPKLLIYGDTSRPSGVPDRFSGSKSDTSASLAITGLQAEDEADYYCQSFDRSLSGLVIFGGGTRLTVL

SEQ ID NO: 1038 - protein, 14 aa, Human
TGSSSNIGAGYDVH

SEQ ID NO: 1039 - protein, 7 aa, Human
GDTSRPS

SEQ ID NO: 1040 - protein, 12 aa, Human
QSFDRSLSGLVI

SEQ ID NO: 1041 - protein, 22 aa, Human
QSVLTQPPSMSGAPGQRVTISC

SEQ ID NO: 1042 - protein, 15 aa, Human
WYQQLPGAAPKLLIY

SEQ ID NO: 1043 - protein, 32 aa, Human
GVPDRFSGSKSDTSASLAITGLQAEDEADYYC

SEQ ID NO: 1044 - protein, 10 aa, Human
FGGGTRLTVL

SEQ ID NO: 1045 - protein, 184 aa, Human
QVQLVQSGAEVKKPGASVKVSCKASGYTFTGYYMHWVRQAPGQGLEWMGRINPNSGDTNYAQKFQGRVTMTRDTSISTAYMELSRLRSDDTAVYYCARLGKGMAAARTVFDSWGQGTLVTVSSASTKGPSVFPLAPSSKSTSGGTAALGCLVKDYFPEPVTVSWNSGALTSGVHTFPAVLQSSG

SEQ ID NO: 1046 - protein, 123 aa, Human
QVQLVQSGAEVKKPGASVKVSCKASGYTFTGYYMHWVRQAPGQGLEWMGRINPNSGDTNYAQKFQGRVTMTRDTSISTAYMELSRLRSDDTAVYYCARLGKGMAAARTVFDSWGQGTLVTVSS

SEQ ID NO: 1047 - protein, 5 aa, Human
GYYMH

SEQ ID NO: 1048 - protein, 17 aa, Human
RINPNSGDTNYAQKFQG

SEQ ID NO: 1049 - protein, 14 aa, Human
LGKGMAAARTVFDS

SEQ ID NO: 1050 - protein, 30 aa, Human; identical to SEQ ID NO: 222

SEQ ID NO: 1051 - protein, 14 aa, Human
WVRQAPGQGLEWMG

SEQ ID NO: 1052 - protein, 32 aa, Human; identical to SEQ ID NO: 836

SEQ ID NO: 1053 - protein, 11 aa, Human
WGQGTLVTVSS

SEQ ID NO: 1054 - protein, 187 aa, Human
EVVLTQSPGTLSLSPGERATLSCRASQSVSSSYLAWYQQKPGQAPRLVIYGASSRATGIPDRFSGSGSGTDFTLTISRLEPEDFAVYYCQQFGSSPTFGRGTRLEIKRTVAAPSVFIFPPSDEQLKSGTASVVCLLNNFYPREAKVQWKVDNALQSGNSQESVTEQDSKDSTYSLSSTLTLSKADYE

SEQ ID NO: 1055 - protein, 107 aa, Human
EVVLTQSPGTLSLSPGERATLSCRASQSVSSSYLAWYQQKPGQAPRLVIYGASSRATGIPDRFSGSGSGTDFTLTISRLEPEDFAVYYCQQFGSSPTFGRGTRLEIK

SEQ ID NO: 1056 - protein, 12 aa, Human
RASQSVSSSYLA

SEQ ID NO: 1057 - protein, 7 aa, Human
GASSRAT

SEQ ID NO: 1058 - protein, 8 aa, Human
QQFGSSPT

SEQ ID NO: 1059 - protein, 23 aa, Human
EVVLTQSPGTLSLSPGERATLSC

SEQ ID NO: 1060 - protein, 15 aa, Human
WYQQKPGQAPRLVIY

SEQ ID NO: 1061 - protein, 32 aa, Human; identical to SEQ ID NO: 233

SEQ ID NO: 1062 - protein, 10 aa, Human
FGRGTRLEIK

SEQ ID NO: 1063 - protein, 183 aa, Human
QVHLVQSGAEVKKPGASVKVSCKASGYTFTGYYMNWVRQAPGQGLEWMGRINPNSGGTNYAQKFQGRVTMTRDTSISTAYMELSRLRSDDAAVYYCARAERYSSSWYNLYYWGQGTLVTVSSASTKGPSVFPLAPSSKSTSGGTAALGCLVKDYFPEPVTVSWNSGALTSGVHTFPAVLQSSG

SEQ ID NO: 1064 - protein, 122 aa, Human
QVHLVQSGAEVKKPGASVKVSCKASGYTFTGYYMNWVRQAPGQGLEWMGRINPNSGGTNYAQKFQGRVTMTRDTSISTAYMELSRLRSDDAAVYYCARAERYSSSWYNLYYWGQGTLVTVSS

SEQ ID NO: 1065 - protein, 5 aa, Human
GYYMN

SEQ ID NO: 1066 - protein, 17 aa, Human
RINPNSGGTNYAQKFQG

SEQ ID NO: 1067 - protein, 13 aa, Human
AERYSSSWYNLYY

SEQ ID NO: 1068 - protein, 30 aa, Human
QVHLVQSGAEVKKPGASVKVSCKASGYTFT

SEQ ID NO: 1069 - protein, 14 aa, Human
WVRQAPGQGLEWMG

SEQ ID NO: 1070 - protein, 32 aa, Human
RVTMTRDTSISTAYMELSRLRSDDAAVYYCAR

SEQ ID NO: 1071 - protein, 11 aa, Human
WGQGTLVTVSS

SEQ ID NO: 1072 - protein, 192 aa, Human
QSVLTQPPSASGTPGQRVTISCSGSSSNIGSNTVNWYQQLPGTAPKLLIYSNNQRPSGVPDRFSGSKSGTSASLAISGLQSEDEADYYCAAWDDSLNGVVFGGGTKLTVLGQPKAAPSVTLFPPSSEELQANKATLVCLISDFYPGAVTVAWKADSSPVKAGVETTTPSKQSNNKYAASSYLSLTPEQWKSH

SEQ ID NO: 1073 - protein, 110 aa, Human
QSVLTQPPSASGTPGQRVTISCSGSSSNIGSNTVNWYQQLPGTAPKLLIYSNNQRPSGVPDRFSGSKSGTSASLAISGLQSEDEADYYCAAWDDSLNGVVFGGGTKLTVL

SEQ ID NO: 1074 - protein, 13 aa, Human
SGSSSNIGSNTVN

SEQ ID NO: 1075 - protein, 7 aa, Human
SNNQRPS

SEQ ID NO: 1076 - protein, 11 aa, Human
AAWDDSLNGVV

SEQ ID NO: 1077 - protein, 22 aa, Human
QSVLTQPPSASGTPGQRVTISC

SEQ ID NO: 1078 - protein, 15 aa, Human
WYQQLPGTAPKLLIY

SEQ ID NO: 1079 - protein, 32 aa, Human; identical to SEQ ID NO: 143

SEQ ID NO: 1080 - protein, 10 aa, Human
FGGGTKLTVL

SEQ ID NO: 1081 - protein, 213 aa, Human
EVQLVQSGAEVKKPGESLKISCKGSRYSFTRYWIAWVRQMPGKGLEWMGIIYPGDSDTRYSPSFQGPVTISADKSISTAYLQWSSLKASDTAIYYCARLPNSNYVDYWGQGTLVTVSSASTKGPSVFPLAPSSKSTSGGTAALGCLVKDYFPEPVTVSWNSGALTSGVHTFPAVLQSSGLYSLSSVVTVPSSSLGTQTYICNVNHKPSNTKVD

SEQ ID NO: 1082 - protein, 118 aa, Human
EVQLVQSGAEVKKPGESLKISCKGSRYSFTRYWIAWVRQMPGKGLEWMGIIYPGDSDTRYSPSFQGPVTISADKSISTAYLQWSSLKASDTAIYYCARLPNSNYVDYWGQGTLVTVSS

SEQ ID NO: 1083 - protein, 5 aa, Human
RYWIA

SEQ ID NO: 1084 - protein, 17 aa, Human
IIYPGDSDTRYSPSFQG

SEQ ID NO: 1085 - protein, 9 aa, Human
LPNSNYVDY

SEQ ID NO: 1086 - protein, 30 aa, Human
EVQLVQSGAEVKKPGESLKISCKGSRYSFT

SEQ ID NO: 1087 - protein, 14 aa, Human
WVRQMPGKGLEWMG

SEQ ID NO: 1088 - protein, 32 aa, Human
PVTISADKSISTAYLQWSSLKASDTAIYYCAR

SEQ ID NO: 1089 - protein, 11 aa, Human
WGQGTLVTVSS

SEQ ID NO: 1090 - protein, 187 aa, Human
DIQMTQSPSTLSASVGDRVTITCRASQSISSWLAWYQQKPGKAPKLLIYDASSLESGVPSRFSGSGSGTEFTLTISSLQPDDFATYYCQQYNIYPYTFGQGTKLDIKRTVAAPSVFIFPPSDEQLKSGTASVVCLLNNFYPREAKVQWKVDNALQSGNSQESVTEQDSKDSTYSLSSTLTLSKADYE

SEQ ID NO: 1091 - protein, 107 aa, Human
DIQMTQSPSTLSASVGDRVTITCRASQSISSWLAWYQQKPGKAPKLLIYDASSLESGVPSRFSGSGSGTEFTLTISSLQPDDFATYYCQQYNIYPYTFGQGTKLDIK

SEQ ID NO: 1092 - protein, 11 aa, Human
RASQSISSWLA

SEQ ID NO: 1093 - protein, 7 aa, Human
DASSLES

SEQ ID NO: 1094 - protein, 9 aa, Human
QQYNIYPYT

SEQ ID NO: 1095 - protein, 23 aa, Human
DIQMTQSPSTLSASVGDRVTITC

SEQ ID NO: 1096 - protein, 15 aa, Human
WYQQKPGKAPKLLIY

SEQ ID NO: 1097 - protein, 32 aa, Human; identical to SEQ ID NO: 737

SEQ ID NO: 1098 - protein, 10 aa, Human
FGQGTKLDIK

SEQ ID NO: 1099 - protein, 220 aa, Human
QVQLVESGGGVVQPGGSVRLSCAASGFDFTNNGMYWVRQAPGKGLEWVAFIRYDGNKQDYADSVKGRFTISRDNSKNTLYLQMSSLRPEDTAVYYCAKGVYTENYGWGQGTLVTVSSGTTVTVSSASTKGPSVFPLAPCSRSTSESTAALGCLVKDYFPEPVTVSWNSGALTSGVHTFPAVLQSSGLYSLSSVVTVPSSNFGTQTYTCNVDHKPSNTKVD

SEQ ID NO: 1100 - protein, 117 aa, Human
QVQLVESGGGVVQPGGSVRLSCAASGFDFTNNGMYWVRQAPGKGLEWVAFIRYDGNKQDYADSVKGRFTISRDNSKNTLYLQMSSLRPEDTAVYYCAKGVYTENYGWGQGTLVTVSS

SEQ ID NO: 1101 - protein, 5 aa, Human
NNGMY

SEQ ID NO: 1102 - protein, 17 aa, Human
FIRYDGNKQDYADSVKG

SEQ ID NO: 1103 - protein, 8 aa, Human
GVYTENYG

SEQ ID NO: 1104 - protein, 30 aa, Human
QVQLVESGGGVVQPGGSVRLSCAASGFDFT

SEQ ID NO: 1105 - protein, 14 aa, Human
WVRQAPGKGLEWVA

SEQ ID NO: 1106 - protein, 32 aa, Human
RFTISRDNSKNTLYLQMSSLRPEDTAVYYCAK

SEQ ID NO: 1107 - protein, 11 aa, Human
WGQGTLVTVSS

SEQ ID NO: 1108 - protein, 189 aa, Human
EIVLTQSPGTLSLSPGERATLSCRASQTVTSRYLAWYQQKPGQAPRLLIYGASTRATGIPDRFSGSGSGTDFTLTISRLEPEDFAVYYCQQYGNSPPYTFGQGTKLEIKRTVAAPSVFIFPPSDEQLKSGTASVVCLLNNFYPREAKVQWKVDNALQSGNSQESVTEQDSKDSTYSLSSTLTLSKADYE

SEQ ID NO: 1109 - protein, 109 aa, Human
EIVLTQSPGTLSLSPGERATLSCRASQTVTSRYLAWYQQKPGQAPRLLIYGASTRATGIPDRFSGSGSGTDFTLTISRLEPEDFAVYYCQQYGNSPPYTFGQGTKLEIK

SEQ ID NO: 1110 - protein, 12 aa, Human
RASQTVTSRYLA

SEQ ID NO: 1111 - protein, 7 aa, Human
GASTRAT

SEQ ID NO: 1112 - protein, 10 aa, Human
QQYGNSPPYT

SEQ ID NO: 1113 - protein, 23 aa, Human
EIVLTQSPGTLSLSPGERATLSC

SEQ ID NO: 1114 - protein, 15 aa, Human
WYQQKPGQAPRLLIY

SEQ ID NO: 1115 - protein, 32 aa, Human; identical to SEQ ID NO: 233

SEQ ID NO: 1116 - protein, 10 aa, Human
FGQGTKLEIK

SEQ ID NO: 1117 - protein, 210 aa, Human
QVQLVESGGGVVQPGRSLRLSCAASGFTFSTYGMHWVRQAPGKGLEWVAVISYDGSNKYYADSVKGRFTISRDNSKNTLYLQMNSLRAEDTAVYYCAKQQGTYCSGGNCYSGYFDYWGQGTLVTVSSASTKGPSVFPLAPSSKSTSGGTAALGCLVKDYFPEPVTVSWNSGALTSGVHTFPAVLQSSGLYSLSSVVTVPSSSLGTQTYIC

SEQ ID NO: 1118 - protein, 127 aa, Human
QVQLVESGGGVVQPGRSLRLSCAASGFTFSTYGMHWVRQAPGKGLEWVAVISYDGSNKYYADSVKGRFTISRDNSKNTLYLQMNSLRAEDTAVYYCAKQQGTYCSGGNCYSGYFDYWGQGTLVTVSS

SEQ ID NO: 1119 - protein, 5 aa, Human
TYGMH

SEQ ID NO: 1120 - protein, 17 aa, Human
VISYDGSNKYYADSVKG

SEQ ID NO: 1121 - protein, 18 aa, Human
QQGTYCSGGNCYSGYFDY

SEQ ID NO: 1122 - protein, 30 aa, Human; identical to SEQ ID NO: 168

SEQ ID NO: 1123 - protein, 14 aa, Human
WVRQAPGKGLEWVA

SEQ ID NO: 1124 - protein, 32 aa, Human; identical to SEQ ID NO: 692

SEQ ID NO: 1125 - protein, 11 aa, Human
WGQGTLVTVSS

SEQ ID NO: 1126 - protein, 187 aa, Human
DIQMTQSPSSLSASVGDRVTITCQASQDISNYLNWYQQKPGKAPKLLIYDASNLETGVPSRFSGSGSGTDFSFSISSLQPEDIATYYCQQYDNVPLTFGGGTKVEIKRTVAAPSVFIFPPSDEQLKSGTASVVCLLNNFYPREAKVQWKVDNALQSGNSQESVTEQDSKDSTYSLSSTLTLSKADYE

SEQ ID NO: 1127 - protein, 107 aa, Human
DIQMTQSPSSLSASVGDRVTITCQASQDISNYLNWYQQKPGKAPKLLIYDASNLETGVPSRFSGSGSGTDFSFSISSLQPEDIATYYCQQYDNVPLTFGGGTKVEIK

SEQ ID NO: 1128 - protein, 11 aa, Human
QASQDISNYLN

SEQ ID NO: 1129 - protein, 7 aa, Human
DASNLET

SEQ ID NO: 1130 - protein, 9 aa, Human
QQYDNVPLT

SEQ ID NO: 1131 - protein, 23 aa, Human
DIQMTQSPSSLSASVGDRVTITC

SEQ ID NO: 1132 - protein, 15 aa, Human
WYQQKPGKAPKLLIY

SEQ ID NO: 1133 - protein, 32 aa, Human
GVPSRFSGSGSGTDFSFSISSLQPEDIATYYC

SEQ ID NO: 1134 - protein, 10 aa, Human
FGGGTKVEIK

SEQ ID NO: 1135 - protein, 201 aa, Human
QVQLVQSGAEVKKPGASVKVSCTASGYTVTSYGISWVRQAPGQGLEWMGWISTYNGNTNYAQKLQGRVTMTTDTSTSTAYMELRSLRSDDTAVYYCAREYSYGYRLAYFDYWGQGTLVTVSSGSASAPTLFPLVSCENSPSDTSSVAVGCLAQDFLPDSITFSWKYKNNSDISSTRGFPSVLRGGKYAATSQVLLPSKDVM

SEQ ID NO: 1136 - protein, 122 aa, Human
QVQLVQSGAEVKKPGASVKVSCTASGYTVTSYGISWVRQAPGQGLEWMGWISTYNGNTNYAQKLQGRVTMTTDTSTSTAYMELRSLRSDDTAVYYCAREYSYGYRLAYFDYWGQGTLVTVSS

SEQ ID NO: 1137 - protein, 5 aa, Human
SYGIS

SEQ ID NO: 1138 - protein, 17 aa, Human
WISTYNGNTNYAQKLQG

SEQ ID NO: 1139 - protein, 13 aa, Human
EYSYGYRLAYFDY

SEQ ID NO: 1140 - protein, 30 aa, Human
QVQLVQSGAEVKKPGASVKVSCTASGYTVT

SEQ ID NO: 1141 - protein, 14 aa, Human
WVRQAPGQGLEWMG

SEQ ID NO: 1142 - protein, 32 aa, Human
RVTMTTDTSTSTAYMELRSLRSDDTAVYYCAR

SEQ ID NO: 1143 - protein, 11 aa, Human
WGQGTLVTVSS

SEQ ID NO: 1144 - protein, 193 aa, Human
DIVMTQSPDSLAVSLGERATINCKSSQSVLNSSNNKNYLAWYQQKPGQPPKLLIYWASTRESGVPDRFSGSGSGTDFTLTISSLQAEDVAVYYCQQYYSTPQTFGQGTKVEIKRTVAAPSVFIFPPSDEQLKSGTASVVCLLNNFYPREAKVQWKVDNALQSGNSQESVTEQDSKDSTYSLSSTLTLSKADYE

SEQ ID NO: 1145 - protein, 113 aa, Human
DIVMTQSPDSLAVSLGERATINCKSSQSVLNSSNNKNYLAWYQQKPGQPPKLLIYWASTRESGVPDRFSGSGSGTDFTLTISSLQAEDVAVYYCQQYYSTPQTFGQGTKVEIK

SEQ ID NO: 1146 - protein, 17 aa, Human
KSSQSVLNSSNNKNYLA

SEQ ID NO: 1147 - protein, 7 aa, Human
WASTRES

SEQ ID NO: 1148 - protein, 9 aa, Human
QQYYSTPQT

SEQ ID NO: 1149 - protein, 23 aa, Human
DIVMTQSPDSLAVSLGERATINC

SEQ ID NO: 1150 - protein, 15 aa, Human
WYQQKPGQPPKLLIY

SEQ ID NO: 1151 - protein, 32 aa, Human; identical to SEQ ID NO: 359

SEQ ID NO: 1152 - protein, 10 aa, Human
FGQGTKVEIK

SEQ ID NO: 1153 - protein, 183 aa, Human
EVQLVESGGGLVQPGGSLRISCSASGFTFSRYAMHWVRQAPGKGLEYVSAIRSNGGSTYYADSVRGRFTISRDNSRNTLYLQMSSLRAEDTAVYYCVIINNLAAAGTRFDYWGQGTLVTVSSASTKGPSVFPLAPSSKSTSGGTAALGCLVKDYFPEPVTVSWNSGALTSGVHTFPAVLQSSG

SEQ ID NO: 1154 - protein, 122 aa, Human
EVQLVESGGGLVQPGGSLRISCSASGFTFSRYAMHWVRQAPGKGLEYVSAIRSNGGSTYYADSVRGRFTISRDNSRNTLYLQMSSLRAEDTAVYYCVIINNLAAAGTRFDYWGQGTLVTVSS

SEQ ID NO: 1155 - protein, 5 aa, Human
RYAMH

SEQ ID NO: 1156 - protein, 17 aa, Human
AIRSNGGSTYYADSVRG

SEQ ID NO: 1157 - protein, 13 aa, Human
INNLAAAGTRFDY

SEQ ID NO: 1158 - protein, 30 aa, Human
EVQLVESGGGLVQPGGSLRISCSASGFTFS

SEQ ID NO: 1159 - protein, 14 aa, Human
WVRQAPGKGLEYVS

SEQ ID NO: 1160 - protein, 32 aa, Human
RFTISRDNSRNTLYLQMSSLRAEDTAVYYCVI

SEQ ID NO: 1161 - protein, 11 aa, Human
WGQGTLVTVSS

SEQ ID NO: 1162 - protein, 193 aa, Human
DIVMTQSPDSLAVSLGERATINCKSSQSVLYSSNNKNFLTWYQQKPGQPPKLLIYWASTRESGVPDRFSGSGSGTDFTLTISSLQAEDVAVYYCQQYYTTPWTFGQGTKVEIKRTVAAPSVFIFPPSDEQLKSGTASVVCLLNNFYPREAKVQWKVDNALQSGNSQESVTEQDSKDSTYSLSSTLTLSKADYE

SEQ ID NO: 1163 - protein, 113 aa, Human
DIVMTQSPDSLAVSLGERATINCKSSQSVLYSSNNKNFLTWYQQKPGQPPKLLIYWASTRESGVPDRFSGSGSGTDFTLTISSLQAEDVAVYYCQQYYTTPWTFGQGTKVEIK

SEQ ID NO: 1164 - protein, 17 aa, Human
KSSQSVLYSSNNKNFLT

SEQ ID NO: 1165 - protein, 7 aa, Human
WASTRES

SEQ ID NO: 1166 - protein, 9 aa, Human
QQYYTTPWT

SEQ ID NO: 1167 - protein, 23 aa, Human
DIVMTQSPDSLAVSLGERATINC

SEQ ID NO: 1168 - protein, 15 aa, Human
WYQQKPGQPPKLLIY

SEQ ID NO: 1169 - protein, 32 aa, Human; identical to SEQ ID NO: 359

SEQ ID NO: 1170 - protein, 10 aa, Human
FGQGTKVEIK

SEQ ID NO: 1171 - protein, 213 aa, Human
QVQLQQWGAGLLKPSETLSLTCAVYGGSFSGYFWSWIRQPPGKGLEWIGEINHSGSTNYNPSLKSRVTISVDTSKNQFSLKLSSVTAADTAVYYCARAPYYDFLREGNWFDPWGQGTLVTVSSASTKGPSVFPLAPSSKSTSGGTAALGCLVKDYFPEPVTVSWNSGALTSGVHTFPAVLQSSGLYSLSSVVTVPSSSLGTQTYICNVNHKPS

SEQ ID NO: 1172 - protein, 123 aa, Human
QVQLQQWGAGLLKPSETLSLTCAVYGGSFSGYFWSWIRQPPGKGLEWIGEINHSGSTNYNPSLKSRVTISVDTSKNQFSLKLSSVTAADTAVYYCARAPYYDFLREGNWFDPWGQGTLVTVSS

SEQ ID NO: 1173 - protein, 5 aa, Human
GYFWS

SEQ ID NO: 1174 - protein, 16 aa, Human
EINHSGSTNYNPSLKS

SEQ ID NO: 1175 - protein, 15 aa, Human
APYYDFLREGNWFDP

SEQ ID NO: 1176 - protein, 30 aa, Human
QVQLQQWGAGLLKPSETLSLTCAVYGGSFS

SEQ ID NO: 1177 - protein, 14 aa, Human
WIRQPPGKGLEWIG

SEQ ID NO: 1178 - protein, 32 aa, Human; identical to SEQ ID NO: 134

SEQ ID NO: 1179 - protein, 11 aa, Human
WGQGTLVTVSS

SEQ ID NO: 1180 - protein, 193 aa, Human
DIVMTQSPDSLAVSLGERATINCNSSQSVLYSSINKNYLAWYQQKPAQPPKVLIYWASTRESGVPDRFSGSGSGTDFTLTISSLQAEDVAVYYCQQYYRTPWTFGQGTKVEIKRTVAAPSVFIFPPSDEQLKSGTASVVCLLNNFYPREAKVQWKVDNALQSGNSQESVTEQDSKDSTYSLSSTLTLSKADYE

SEQ ID NO: 1181 - protein, 113 aa, Human
DIVMTQSPDSLAVSLGERATINCNSSQSVLYSSINKNYLAWYQQKPAQPPKVLIYWASTRESGVPDRFSGSGSGTDFTLTISSLQAEDVAVYYCQQYYRTPWTFGQGTKVEIK

SEQ ID NO: 1182 - protein, 17 aa, Human
NSSQSVLYSSINKNYLA

SEQ ID NO: 1183 - protein, 7 aa, Human
WASTRES

SEQ ID NO: 1184 - protein, 9 aa, Human
QQYYRTPWT

SEQ ID NO: 1185 - protein, 23 aa, Human
DIVMTQSPDSLAVSLGERATINC

SEQ ID NO: 1186 - protein, 15 aa, Human
WYQQKPAQPPKVLIY

SEQ ID NO: 1187 - protein, 32 aa, Human; identical to SEQ ID NO: 359

SEQ ID NO: 1188 - protein, 10 aa, Human
FGQGTKVEIK

SEQ ID NO: 1189 - protein, 187 aa, Human
QVQLVQSGAEVKKPGSSVKVSCKASGDTFGSYSITWVRQAPGQGLEWMGRIIPVLGIANYAQKFQGRVTITADKSTSTAYMELSSLRSEDTAVYYCAGGGCSGGNCYSWYNWFDPWGQGSLVTVSSASTKGPSVFPLAPSSKSTSGGTAALGCLVKDYFPEPVTVSWNSGALTSGVHTFPAVLQSSG

SEQ ID NO: 1190 - protein, 126 aa, Human
QVQLVQSGAEVKKPGSSVKVSCKASGDTFGSYSITWVRQAPGQGLEWMGRIIPVLGIANYAQKFQGRVTITADKSTSTAYMELSSLRSEDTAVYYCAGGGCSGGNCYSWYNWFDPWGQGSLVTVSS

SEQ ID NO: 1191 - protein, 5 aa, Human
SYSIT

SEQ ID NO: 1192 - protein, 17 aa, Human
RIIPVLGIANYAQKFQG

SEQ ID NO: 1193 - protein, 17 aa, Human
GGCSGGNCYSWYNWFDP

SEQ ID NO: 1194 - protein, 30 aa, Human
QVQLVQSGAEVKKPGSSVKVSCKASGDTFG

SEQ ID NO: 1195 - protein, 14 aa, Human
WVRQAPGQGLEWMG

SEQ ID NO: 1196 - protein, 32 aa, Human
RVTITADKSTSTAYMELSSLRSEDTAVYYCAG

SEQ ID NO: 1197 - protein, 11 aa, Human
WGQGSLVTVSS

SEQ ID NO: 1198 - protein, 188 aa, Human
EIVLTQSPGTLSLSPGERATLSCRASQSVSSNYLAWYQQKPGQAPRLLIYGASSRATGIPERFSGSGSGTDFTLTISRLEPEDFAVYYCQQYGRSPYTFGQGTKLEIKRTVAAPSVFIFPPSDEQLKSGTASVVCLLNNFYPREAKVQWKVDNALQSGNSQESVTEQDSKDSTYSLSSTLTLSKADYE

SEQ ID NO: 1199 - protein, 108 aa, Human
EIVLTQSPGTLSLSPGERATLSCRASQSVSSNYLAWYQQKPGQAPRLLIYGASSRATGIPERFSGSGSGTDFTLTISRLEPEDFAVYYCQQYGRSPYTFGQGTKLEIK

SEQ ID NO: 1200 - protein, 12 aa, Human
RASQSVSSNYLA

SEQ ID NO: 1201 - protein, 7 aa, Human
GASSRAT

SEQ ID NO: 1202 - protein, 9 aa, Human
QQYGRSPYT

SEQ ID NO: 1203 - protein, 23 aa, Human
EIVLTQSPGTLSLSPGERATLSC

SEQ ID NO: 1204 - protein, 15 aa, Human
WYQQKPGQAPRLLIY

SEQ ID NO: 1205 - protein, 32 aa, Human
GIPERFSGSGSGTDFTLTISRLEPEDFAVYYC

SEQ ID NO: 1206 - protein, 10 aa, Human
FGQGTKLEIK

SEQ ID NO: 1207 - protein, 214 aa, Human
QVQLQESGPGLVKPSETLSLTCTVSGGSISSYYWSWIRQPPGKGLEWIGYINYRGITNYNPSLKSRVTISVDMSKNQFSLKLSSVTAADTAVYSCARLAVASRGTVDYWGQGTLVTVSSASTKGPSVFPLAPSSKSTSGGTAALGCLVKDYFPEPVTVSWNSGALTSGVHTFPAVLQSSGLYSLSSVVTVPSSNFGTQTYTCNVDHKPSNTKVD

SEQ ID NO: 1208 - protein, 119 aa, Human
QVQLQESGPGLVKPSETLSLTCTVSGGSISSYYWSWIRQPPGKGLEWIGYINYRGITNYNPSLKSRVTISVDMSKNQFSLKLSSVTAADTAVYSCARLAVASRGTVDYWGQGTLVTVSS

SEQ ID NO: 1209 - protein, 5 aa, Human
SYYWS

SEQ ID NO: 1210 - protein, 16 aa, Human
YINYRGITNYNPSLKS

SEQ ID NO: 1211 - protein, 11 aa, Human
LAVASRGTVDY

SEQ ID NO: 1212 - protein, 30 aa, Human; identical to SEQ ID NO: 24

SEQ ID NO: 1213 - protein, 14 aa, Human
WIRQPPGKGLEWIG

SEQ ID NO: 1214 - protein, 32 aa, Human
RVTISVDMSKNQFSLKLSSVTAADTAVYSCAR

SEQ ID NO: 1215 - protein, 11 aa, Human
WGQGTLVTVSS

SEQ ID NO: 1216 - protein, 193 aa, Human
QSVLTQPPSASGTPGQRVTISCSGSSSNIGSNYVYWYQQLPGTAPKLLIYRNNQRPSGVPDRFSGSKSGTSASLAISGLRSEDEADYYCAAWDDSLSVNVVFGGGTKLTVLGQPKAAPSVTLFPPSSEELQANKATLVCLISDFYPGAVTVAWKADSSPVKAGVETTKPSKQSNNKYAASSYLSLTPEQWKSH

SEQ ID NO: 1217 - protein, 111 aa, Human
QSVLTQPPSASGTPGQRVTISCSGSSSNIGSNYVYWYQQLPGTAPKLLIYRNNQRPSGVPDRFSGSKSGTSASLAISGLRSEDEADYYCAAWDDSLSVNVVFGGGTKLTVL

SEQ ID NO: 1218 - protein, 13 aa, Human
SGSSSNIGSNYVY

SEQ ID NO: 1219 - protein, 7 aa, Human
RNNQRPS

SEQ ID NO: 1220 - protein, 12 aa, Human
AAWDDSLSVNVV

SEQ ID NO: 1221 - protein, 22 aa, Human
QSVLTQPPSASGTPGQRVTISC

SEQ ID NO: 1222 - protein, 15 aa, Human
WYQQLPGTAPKLLIY

SEQ ID NO: 1223 - protein, 32 aa, Human; identical to SEQ ID NO: 539

SEQ ID NO: 1224 - protein, 10 aa, Human
FGGGTKLTVL

SEQ ID NO: 1225 - protein, 186 aa, Human
QVQLVQSGTEVKKPGASVKVSCKASGYTFTDYYMHWVRQAPGQGLEWMGRINPTSGGTNYPQKFQGSVTMTRDTSLSTVYMELSGLRSDDTAVYYCARERVTLIQGKNHYYMDVWGTGTTVTVSSASTKGPSVFPLAPSSKSTSGGTAALGCLVKDYFPEPVTVSWNSGALTSGVHTFPAVLQSSG

SEQ ID NO: 1226 - protein, 125 aa, Human
QVQLVQSGTEVKKPGASVKVSCKASGYTFTDYYMHWVRQAPGQGLEWMGRINPTSGGTNYPQKFQGSVTMTRDTSLSTVYMELSGLRSDDTAVYYCARERVTLIQGKNHYYMDVWGTGTTVTVSS

SEQ ID NO: 1227 - protein, 5 aa, Human
DYYMH

SEQ ID NO: 1228 - protein, 17 aa, Human
RINPTSGGTNYPQKFQG

SEQ ID NO: 1229 - protein, 16 aa, Human
ERVTLIQGKNHYYMDV

SEQ ID NO: 1230 - protein, 30 aa, Human
QVQLVQSGTEVKKPGASVKVSCKASGYTFT

SEQ ID NO: 1231 - protein, 14 aa, Human
WVRQAPGQGLEWMG

SEQ ID NO: 1232 - protein, 32 aa, Human
SVTMTRDTSLSTVYMELSGLRSDDTAVYYCAR

SEQ ID NO: 1233 - protein, 11 aa, Human
WGTGTTVTVSS

SEQ ID NO: 1234 - protein, 193 aa, Human
QSALTQPASVSGSPGQSITISCTGTNSDVGGYNYVSWYQQHPGKAPRLMIYDVSNRPSGVSNRFSGSKSGNTASLTISGLQAEDEADYYCSSYTSSSTLVVFGGGTKLTVLGQPKAAPSVTLFPPSSEELQANKATLVCLISDFYPGAVTVAWKADSSPVKAGVETTTPSKQSNNKYAASSYLSLTPEQWKSH

SEQ ID NO: 1235 - protein, 111 aa, Human
QSALTQPASVSGSPGQSITISCTGTNSDVGGYNYVSWYQQHPGKAPRLMIYDVSNRPSGVSNRFSGSKSGNTASLTISGLQAEDEADYYCSSYTSSSTLVVFGGGTKLTVL

SEQ ID NO: 1236 - protein, 14 aa, Human
TGTNSDVGGYNYVS

SEQ ID NO: 1237 - protein, 7 aa, Human
DVSNRPS

SEQ ID NO: 1238 - protein, 11 aa, Human
SSYTSSSTLVV

SEQ ID NO: 1239 - protein, 22 aa, Human
QSALTQPASVSGSPGQSITISC

SEQ ID NO: 1240 - protein, 15 aa, Human
WYQQHPGKAPRLMIY

SEQ ID NO: 1241 - protein, 32 aa, Human; identical to SEQ ID NO: 71

SEQ ID NO: 1242 - protein, 10 aa, Human
FGGGTKLTVL

SEQ ID NO: 1243 - protein, 200 aa, Human
QVQLVQSGAEVKKPGASVKVSCKASGYTFTTYAMHWVRQAPGQRLEWMGWINAGNGNTKYSQNFQGRVTITRDTSASTAYMELSSLRSEDTAVYYCASLVGGDSSSWYDYMDVWGKGTTVTVSSASTKGPSVFPLAPCSRSTSESTAALGCLVKDYFPEPVTVSWNSGALTSGVHTFPAVLQSSGLYSLSSVVTVPSSNF

SEQ ID NO: 1244 - protein, 124 aa, Human
QVQLVQSGAEVKKPGASVKVSCKASGYTFTTYAMHWVRQAPGQRLEWMGWINAGNGNTKYSQNFQGRVTITRDTSASTAYMELSSLRSEDTAVYYCASLVGGDSSSWYDYMDVWGKGTTVTVSS

SEQ ID NO: 1245 - protein, 5 aa, Human
TYAMH

SEQ ID NO: 1246 - protein, 17 aa, Human
WINAGNGNTKYSQNFQG

SEQ ID NO: 1247 - protein, 15 aa, Human
LVGGDSSSWYDYMDV

SEQ ID NO: 1248 - protein, 30 aa, Human; identical to SEQ ID NO: 222

SEQ ID NO: 1249 - protein, 14 aa, Human
WVRQAPGQRLEWMG

SEQ ID NO: 1250 - protein, 32 aa, Human
RVTITRDTSASTAYMELSSLRSEDTAVYYCAS

SEQ ID NO: 1251 - protein, 11 aa, Human
WGKGTTVTVSS

SEQ ID NO: 1252 - protein, 187 aa, Human
DIQMTQSPSTLSASVGDRVTITCRASQSISSWLAWYQQKPGKAPKLLIYDASSLESGVPSRFSGSGSGTEFTLTISSLQPDDFATYYCQQYNSYPWTFGQGTKVEIKRTVAAPSVFIFPPSDEQLKSGTASVVCLLNNFYPREAKVQWKVDNALQSGNSQESVTEQDSKDSTYSLSSTLTLSKADYE

SEQ ID NO: 1253 - protein, 107 aa, Human
DIQMTQSPSTLSASVGDRVTITCRASQSISSWLAWYQQKPGKAPKLLIYDASSLESGVPSRFSGSGSGTEFTLTISSLQPDDFATYYCQQYNSYPWTFGQGTKVEIK

SEQ ID NO: 1254 - protein, 11 aa, Human
RASQSISSWLA

SEQ ID NO: 1255 - protein, 7 aa, Human
DASSLES

SEQ ID NO: 1256 - protein, 9 aa, Human
QQYNSYPWT

SEQ ID NO: 1257 - protein, 23 aa, Human
DIQMTQSPSTLSASVGDRVTITC

SEQ ID NO: 1258 - protein, 15 aa, Human
WYQQKPGKAPKLLIY

SEQ ID NO: 1259 - protein, 32 aa, Human; identical to SEQ ID NO: 737

SEQ ID NO: 1260 - protein, 10 aa, Human
FGQGTKVEIK

SEQ ID NO: 1261 - protein, 180 aa, Human
QVQLVQSGAEVKKPGSSVKVSCKASGGTFSSYTISWVRQAPGQGLEWMGRIIPVRDIANYAQKFQGRVTITADKSTRTAYMEVSSLRSEDTAVYYCAATELRSDGLDIWGQGTMVTVSSASTKGPSVFPLAPSSKSTSGGTAALGCLVKDYFPEPVTVSWNSGALTSGVHTFPAVLQSSG

SEQ ID NO: 1262 - protein, 119 aa, Human
QVQLVQSGAEVKKPGSSVKVSCKASGGTFSSYTISWVRQAPGQGLEWMGRIIPVRDIANYAQKFQGRVTITADKSTRTAYMEVSSLRSEDTAVYYCAATELRSDGLDIWGQGTMVTVSS

SEQ ID NO: 1263 - protein, 5 aa, Human
SYTIS

SEQ ID NO: 1264 - protein, 17 aa, Human
RIIPVRDIANYAQKFQG

SEQ ID NO: 1265 - protein, 10 aa, Human
TELRSDGLDI

SEQ ID NO: 1266 - protein, 30 aa, Human; identical to SEQ ID NO: 384

SEQ ID NO: 1267 - protein, 14 aa, Human
WVRQAPGQGLEWMG

SEQ ID NO: 1268 - protein, 32 aa, Human
RVTITADKSTRTAYMEVSSLRSEDTAVYYCAA

SEQ ID NO: 1269 - protein, 11 aa, Human
WGQGTMVTVSS

SEQ ID NO: 1270 - protein, 188 aa, Human
DIQMTQSPSTLSASVGDRVTITCRASQSISSWLAWYQQKPGKAPKLLIYDASSLESGVPSRFSGSGSGTEFTLTVSSLQPDDFATYYCQQYNNYSPITFGQGTKLEIKRTVAAPSVFIFPPSDEQLKSGTASVVCLLNNFYPREAKVQWKVDNALQSGNSQESVTEQDSKDSTYSLSSTLTLSKADYE

SEQ ID NO: 1271 - protein, 108 aa, Human
DIQMTQSPSTLSASVGDRVTITCRASQSISSWLAWYQQKPGKAPKLLIYDASSLESGVPSRFSGSGSGTEFTLTVSSLQPDDFATYYCQQYNNYSPITFGQGTKLEIK

SEQ ID NO: 1272 - protein, 11 aa, Human
RASQSISSWLA

SEQ ID NO: 1273 - protein, 7 aa, Human
DASSLES

SEQ ID NO: 1274 - protein, 10 aa, Human
QQYNNYSPIT

SEQ ID NO: 1275 - protein, 23 aa, Human
DIQMTQSPSTLSASVGDRVTITC

SEQ ID NO: 1276 - protein, 15 aa, Human
WYQQKPGKAPKLLIY

SEQ ID NO: 1277 - protein, 32 aa, Human
GVPSRFSGSGSGTEFTLTVSSLQPDDFATYYC

SEQ ID NO: 1278 - protein, 10 aa, Human
FGQGTKLEIK

SEQ ID NO: 1279 - protein, 178 aa, Human
QVQLVQSGAEVKKPGASVKVSCKASGYTFSNYGISWVRQAPGQGLEWMGWISAYNGNTKYPQKLQGRVTMSTDTSTSTAYMELRSLRSDDTAVYYCARETRYGMDVWGQGTTVTVSSASTKGPSVFPLAPSSKSTSGGTAALGCLVKDYFPEPVTVSWNSGALTSGVHTFPAVLQSSG

SEQ ID NO: 1280 - protein, 117 aa, Human
QVQLVQSGAEVKKPGASVKVSCKASGYTFSNYGISWVRQAPGQGLEWMGWISAYNGNTKYPQKLQGRVTMSTDTSTSTAYMELRSLRSDDTAVYYCARETRYGMDVWGQGTTVTVSS

SEQ ID NO: 1281 - protein, 5 aa, Human
NYGIS

SEQ ID NO: 1282 - protein, 17 aa, Human
WISAYNGNTKYPQKLQG

SEQ ID NO: 1283 - protein, 8 aa, Human
ETRYGMDV

SEQ ID NO: 1284 - protein, 30 aa, Human
QVQLVQSGAEVKKPGASVKVSCKASGYTFS

SEQ ID NO: 1285 - protein, 14 aa, Human
WVRQAPGQGLEWMG

SEQ ID NO: 1286 - protein, 32 aa, Human
RVTMSTDTSTSTAYMELRSLRSDDTAVYYCAR

SEQ ID NO: 1287 - protein, 11 aa, Human
WGQGTTVTVSS

SEQ ID NO: 1288 - protein, 198 aa, Human
QPVLTQPPSASASLGASVTLTCTLSSGYSNYKVDWYQQRPGKGPQFVMRVGTGGIVGSKGDGIPDRFSVLGSGLNRYLTIKNIQEEDESDYHCGADHGSGSNFVRVFGGGTKLTVLGQPKAAPSVTLFPPSSEELQANKATLVCLISDFYPGAVTVAWKADSSPVKAGVETTTPSKQSNNKYAASSYLSLTPEQWKSH

SEQ ID NO: 1289 - protein, 116 aa, Human
QPVLTQPPSASASLGASVTLTCTLSSGYSNYKVDWYQQRPGKGPQFVMRVGTGGIVGSKGDGIPDRFSVLGSGLNRYLTIKNIQEEDESDYHCGADHGSGSNFVRVFGGGTKLTVL

SEQ ID NO: 1290 - protein, 12 aa, Human
TLSSGYSNYKVD

SEQ ID NO: 1291 - protein, 12 aa, Human
VGTGGIVGSKGD

SEQ ID NO: 1292 - protein, 13 aa, Human
GADHGSGSNFVRV

SEQ ID NO: 1293 - protein, 22 aa, Human
QPVLTQPPSASASLGASVTLTC

SEQ ID NO: 1294 - protein, 15 aa, Human
WYQQRPGKGPQFVMR

SEQ ID NO: 1295 - protein, 32 aa, Human
GIPDRFSVLGSGLNRYLTIKNIQEEDESDYHC

SEQ ID NO: 1296 - protein, 10 aa, Human
FGGGTKLTVL

SEQ ID NO: 1297 - protein, 181 aa, Human
EVQLVQSGAEVKKPGESLKISCKGSGYTFTSYWIGWVRQMPGKGLEWMGIIYLGDSDTRYSPSFQGQVTISADKSISTAYLQWNSLKASDTAMYYCARQVTGTTSWFDPWGQGTLVTVSSASTKGPSVFPLAPSSKSTSGGTAALGCLVKDYFPEPVTVSWNSGALTSGVHTFPAVLQSSG

SEQ ID NO: 1298 - protein, 120 aa, Human
EVQLVQSGAEVKKPGESLKISCKGSGYTFTSYWIGWVRQMPGKGLEWMGIIYLGDSDTRYSPSFQGQVTISADKSISTAYLQWNSLKASDTAMYYCARQVTGTTSWFDPWGQGTLVTVSS

SEQ ID NO: 1299 - protein, 5 aa, Human
SYWIG

SEQ ID NO: 1300 - protein, 17 aa, Human
IIYLGDSDTRYSPSFQG

SEQ ID NO: 1301 - protein, 11 aa, Human
QVTGTTSWFDP

SEQ ID NO: 1302 - protein, 30 aa, Human
EVQLVQSGAEVKKPGESLKISCKGSGYTFT

SEQ ID NO: 1303 - protein, 14 aa, Human
WVRQMPGKGLEWMG

SEQ ID NO: 1304 - protein, 32 aa, Human
QVTISADKSISTAYLQWNSLKASDTAMYYCAR

SEQ ID NO: 1305 - protein, 11 aa, Human
WGQGTLVTVSS

SEQ ID NO: 1306 - protein, 187 aa, Human
DIQMTQSPSTLSASVGERVTITCRASQSISRWLAWYQQKPGKAPKLLIYDASSLESGVPSRFSGSGSGTEFTLTISSLQPDDFATYHCHQYSTYSLTFGGGTKVDIKRTVAAPSVFIFPPSDEQLKSGTASVVCLLNNFYPREAKVQWKVDNALQSGNSQESVTEQDSKDSTYSLSSTLTLSKADYE

SEQ ID NO: 1307 - protein, 107 aa, Human
DIQMTQSPSTLSASVGERVTITCRASQSISRWLAWYQQKPGKAPKLLIYDASSLESGVPSRFSGSGSGTEFTLTISSLQPDDFATYHCHQYSTYSLTFGGGTKVDIK

SEQ ID NO: 1308 - protein, 11 aa, Human
RASQSISRWLA

SEQ ID NO: 1309 - protein, 7 aa, Human
DASSLES

SEQ ID NO: 1310 - protein, 9 aa, Human
HQYSTYSLT

SEQ ID NO: 1311 - protein, 23 aa, Human
DIQMTQSPSTLSASVGERVTITC

SEQ ID NO: 1312 - protein, 15 aa, Human
WYQQKPGKAPKLLIY

SEQ ID NO: 1313 - protein, 32 aa, Human
GVPSRFSGSGSGTEFTLTISSLQPDDFATYHC

SEQ ID NO: 1314 - protein, 10 aa, Human
FGGGTKVDIK

SEQ ID NO: 1315 - protein, 144 aa, Human
EVQLVESGGDVVQPGGSLRLSCAASGITFSNYWMTWVRQAPGKGLEWVATIKKDGGEQYYVDSVKGRFTISRDNARNSLYLQINSLRAEDTAVYYCARGGSSSSYYWIYWGQGTLVTVSSGSASAPTLFPLVSCENSPSDTSSV

SEQ ID NO: 1316 - protein, 120 aa, Human
EVQLVESGGDVVQPGGSLRLSCAASGITFSNYWMTWVRQAPGKGLEWVATIKKDGGEQYYVDSVKGRFTISRDNARNSLYLQINSLRAEDTAVYYCARGGSSSSYYWIYWGQGTLVTVSS

SEQ ID NO: 1317 - protein, 5 aa, Human
NYWMT

SEQ ID NO: 1318 - protein, 17 aa, Human
TIKKDGGEQYYVDSVKG

SEQ ID NO: 1319 - protein, 11 aa, Human
GGSSSSYYWIY

SEQ ID NO: 1320 - protein, 30 aa, Human
EVQLVESGGDVVQPGGSLRLSCAASGITFS

SEQ ID NO: 1321 - protein, 14 aa, Human
WVRQAPGKGLEWVA

SEQ ID NO: 1322 - protein, 32 aa, Human
RFTISRDNARNSLYLQINSLRAEDTAVYYCAR

SEQ ID NO: 1323 - protein, 11 aa, Human
WGQGTLVTVSS

SEQ ID NO: 1324 - protein, 188 aa, Human
EIVLTQSPGTLSLSPGERATLSCRASQSISNSYLVWYQQKPGQAPRLLIYGASTRATGIPDRFSGSGSGTDFTLTISRLEPEDFAVYYCQQYGSSPWTFGQGTTVEIKRTVAAPSVFIFPPSDEQLKSGTASVVCLLNNFYPREAKVQWKVDNALQSGNSQESVTEQDSKDSTYSLSSTLTLSKADYE

SEQ ID NO: 1325 - protein, 108 aa, Human
EIVLTQSPGTLSLSPGERATLSCRASQSISNSYLVWYQQKPGQAPRLLIYGASTRATGIPDRFSGSGSGTDFTLTISRLEPEDFAVYYCQQYGSSPWTFGQGTTVEIK

SEQ ID NO: 1326 - protein, 12 aa, Human
RASQSISNSYLV

SEQ ID NO: 1327 - protein, 7 aa, Human
GASTRAT

SEQ ID NO: 1328 - protein, 9 aa, Human
QQYGSSPWT

SEQ ID NO: 1329 - protein, 23 aa, Human
EIVLTQSPGTLSLSPGERATLSC

SEQ ID NO: 1330 - protein, 15 aa, Human
WYQQKPGQAPRLLIY

SEQ ID NO: 1331 - protein, 32 aa, Human; identical to SEQ ID NO: 233

SEQ ID NO: 1332 - protein, 10 aa, Human
FGQGTTVEIK

SEQ ID NO: 1333 - protein, 183 aa, Human
EVQLVESGGGLVKPGGSLRLSCAASGFTFSSYSMNWVRQAPGKGLEWVSSISSSSSYIYYADSVKGRFTISRDNAKNSLYLQLNSLRAEDTAVYYCARDRDQLIFSAAFDIWGQGTMVTVSSASTKGPSVFPLAPSSKSTSGGTAALGCLVKDYFPEPVTVSWNSGALTSGVHTFPAVLQSSG

SEQ ID NO: 1334 - protein, 122 aa, Human
EVQLVESGGGLVKPGGSLRLSCAASGFTFSSYSMNWVRQAPGKGLEWVSSISSSSSYIYYADSVKGRFTISRDNAKNSLYLQLNSLRAEDTAVYYCARDRDQLIFSAAFDIWGQGTMVTVSS

SEQ ID NO: 1335 - protein, 5 aa, Human
SYSMN

SEQ ID NO: 1336 - protein, 17 aa, Human
SISSSSSYIYYADSVKG

SEQ ID NO: 1337 - protein, 13 aa, Human
DRDQLIFSAAFDI

SEQ ID NO: 1338 - protein, 30 aa, Human; identical to SEQ ID NO: 852

SEQ ID NO: 1339 - protein, 14 aa, Human
WVRQAPGKGLEWVS

SEQ ID NO: 1340 - protein, 32 aa, Human
RFTISRDNAKNSLYLQLNSLRAEDTAVYYCAR

SEQ ID NO: 1341 - protein, 11 aa, Human
WGQGTMVTVSS

SEQ ID NO: 1342 - protein, 181 aa, Human
QSVLTQPPSASGTPGQRVTISCSGSSSNIEHNYVFWYQQLPGTAPKLLIYSNNHRPSGVPDRFSGSKSGTSASLAISGLRSEDEADYYCAAWDASLSGPVVFAGGTKLTVLGQPKAAPSVTLFPPSSEELQANKATLVCLISDFYPGAVTVAWKADSSPVKAGVETTTPSKQSNNKYAASS

SEQ ID NO: 1343 - protein, 111 aa, Human
QSVLTQPPSASGTPGQRVTISCSGSSSNIEHNYVFWYQQLPGTAPKLLIYSNNHRPSGVPDRFSGSKSGTSASLAISGLRSEDEADYYCAAWDASLSGPVVFAGGTKLTVL

SEQ ID NO: 1344 - protein, 13 aa, Human
SGSSSNIEHNYVF

SEQ ID NO: 1345 - protein, 7 aa, Human
SNNHRPS

SEQ ID NO: 1346 - protein, 12 aa, Human
AAWDASLSGPVV

SEQ ID NO: 1347 - protein, 22 aa, Human
QSVLTQPPSASGTPGQRVTISC

SEQ ID NO: 1348 - protein, 15 aa, Human
WYQQLPGTAPKLLIY

SEQ ID NO: 1349 - protein, 32 aa, Human; identical to SEQ ID NO: 539

SEQ ID NO: 1350 - protein, 10 aa, Human
FAGGTKLTVL

SEQ ID NO: 1351 - protein, 181 aa, Human
EVQLVESGGGLVQPGGSLRLSCAASGFTFSSYAMSWVRQAPGKGLEWVSAISGSGGSTYYADSVKGRFTISRANSKNTLYLQMNSLRAEDTAVYYCAKGPRFSRDYFDYWGQGTLVTVSSASTKGPSVFPLAPSSKSTSGGTAALGCLVKDYFPEPVTVSWNSGALTSGVHTFPAVLQSSG

SEQ ID NO: 1352 - protein, 120 aa, Human
EVQLVESGGGLVQPGGSLRLSCAASGFTFSSYAMSWVRQAPGKGLEWVSAISGSGGSTYYADSVKGRFTISRANSKNTLYLQMNSLRAEDTAVYYCAKGPRFSRDYFDYWGQGTLVTVSS

SEQ ID NO: 1353 - protein, 5 aa, Human
SYAMS

SEQ ID NO: 1354 - protein, 17 aa, Human
AISGSGGSTYYADSVKG

SEQ ID NO: 1355 - protein, 11 aa, Human
GPRFSRDYFDY

SEQ ID NO: 1356 - protein, 30 aa, Human; identical to SEQ ID NO: 870

SEQ ID NO: 1357 - protein, 14 aa, Human
WVRQAPGKGLEWVS

SEQ ID NO: 1358 - protein, 32 aa, Human
RFTISRANSKNTLYLQMNSLRAEDTAVYYCAK

SEQ ID NO: 1359 - protein, 11 aa, Human
WGQGTLVTVSS

SEQ ID NO: 1360 - protein, 187 aa, Human
DIQMTQSPSTLSASVGDRVTITCRASQSITSWLAWYQQKPGKAPKLLIYDASNLESGVPSRFSGSGSGTEFTLTISSLQPDDFATYYCQQYNNYLGTFGQGTKVEIKRTVAAPSVFIFPPSDEQLKSGTASVVCLLNNFYPREAKVQWKVDNALQSGNSQESVTEQDSKDSTYSLSSTLTLSKADYE

SEQ ID NO: 1361 - protein, 107 aa, Human
DIQMTQSPSTLSASVGDRVTITCRASQSITSWLAWYQQKPGKAPKLLIYDASNLESGVPSRFSGSGSGTEFTLTISSLQPDDFATYYCQQYNNYLGTFGQGTKVEIK

SEQ ID NO: 1362 - protein, 11 aa, Human
RASQSITSWLA

SEQ ID NO: 1363 - protein, 7 aa, Human
DASNLES

SEQ ID NO: 1364 - protein, 9 aa, Human
QQYNNYLGT

SEQ ID NO: 1365 - protein, 23 aa, Human
DIQMTQSPSTLSASVGDRVTITC

SEQ ID NO: 1366 - protein, 15 aa, Human
WYQQKPGKAPKLLIY

SEQ ID NO: 1367 - protein, 32 aa, Human; identical to SEQ ID NO: 737

SEQ ID NO: 1368 - protein, 10 aa, Human
FGQGTKVEIK

SEQ ID NO: 1369 - protein, 180 aa, Human
QVQLVQSGAEVKKPGSSVKVSCKASGGTFSRYTISWVRQAPGQGLEWMGRIIPILGTANYAQNFQGRVTITADKSTSTAYMELSSLRSEDTAVYYCARHGYSYGPFDYWGQGTLVTVSSASTKGPSVFPLAPSSKSTSGGTAALGCLVKDYFPEPVTVSWNSGALTSGVHTFPAVLQSSG

SEQ ID NO: 1370 - protein, 119 aa, Human
QVQLVQSGAEVKKPGSSVKVSCKASGGTFSRYTISWVRQAPGQGLEWMGRIIPILGTANYAQNFQGRVTITADKSTSTAYMELSSLRSEDTAVYYCARHGYSYGPFDYWGQGTLVTVSS

SEQ ID NO: 1371 - protein, 5 aa, Human
RYTIS

SEQ ID NO: 1372 - protein, 17 aa, Human
RIIPILGTANYAQNFQG

SEQ ID NO: 1373 - protein, 10 aa, Human
HGYSYGPFDY

SEQ ID NO: 1374 - protein, 30 aa, Human; identical to SEQ ID NO: 384

SEQ ID NO: 1375 - protein, 14 aa, Human
WVRQAPGQGLEWMG

SEQ ID NO: 1376 - protein, 32 aa, Human; identical to SEQ ID NO: 188

SEQ ID NO: 1377 - protein, 11 aa, Human
WGQGTLVTVSS

SEQ ID NO: 1378 - protein, 193 aa, Human
DIVMTQSPDSLTVSLGERATINCKSSQSVLYSSNNKNYLAWYQQKPGQPPKLLIYWASTRESGVPDRFSGSGSGTDFTLTVSSLQAEDVAVYYCQQYYSTPGTFGQGTKVEIKRTVAAPSVFIFPPSDEQLKSGTASVVCLLNNFYPREAKVQWKVDNALQSGNSQESVTEQDSKDSTYSLSSTLTLSKADYE

SEQ ID NO: 1379 - protein, 113 aa, Human
DIVMTQSPDSLTVSLGERATINCKSSQSVLYSSNNKNYLAWYQQKPGQPPKLLIYWASTRESGVPDRFSGSGSGTDFTLTVSSLQAEDVAVYYCQQYYSTPGTFGQGTKVEIK

SEQ ID NO: 1380 - protein, 17 aa, Human
KSSQSVLYSSNNKNYLA

SEQ ID NO: 1381 - protein, 7 aa, Human
WASTRES

SEQ ID NO: 1382 - protein, 9 aa, Human
QQYYSTPGT

SEQ ID NO: 1383 - protein, 23 aa, Human
DIVMTQSPDSLTVSLGERATINC

SEQ ID NO: 1384 - protein, 15 aa, Human
WYQQKPGQPPKLLIY

SEQ ID NO: 1385 - protein, 32 aa, Human
GVPDRFSGSGSGTDFTLTVSSLQAEDVAVYYC

SEQ ID NO: 1386 - protein, 10 aa, Human
FGQGTKVEIK

SEQ ID NO: 1387 - protein, 185 aa, Human
QVRLQESGPGLVKPSQTLSLTCTVSGGSISSGSYYWSWIRQPAGKGLEWIGRFHTSGSTNYNPSLKSRVTISVDTSKNQFSLKLSSVTAADTAVYYCARDLKGKTWIQTPFDYWGQGILVTVSSASTKGPSVFPLAPSSKSTSGGTAALGCLVKDYFPEPVTVSWNSGALTSGVHTFPAVLQSSG

SEQ ID NO: 1388 - protein, 124 aa, Human
QVRLQESGPGLVKPSQTLSLTCTVSGGSISSGSYYWSWIRQPAGKGLEWIGRFHTSGSTNYNPSLKSRVTISVDTSKNQFSLKLSSVTAADTAVYYCARDLKGKTWIQTPFDYWGQGILVTVSS

SEQ ID NO: 1389 - protein, 7 aa, Human
SGSYYWS

SEQ ID NO: 1390 - protein, 16 aa, Human
RFHTSGSTNYNPSLKS

SEQ ID NO: 1391 - protein, 14 aa, Human
DLKGKTWIQTPFDY

SEQ ID NO: 1392 - protein, 30 aa, Human
QVRLQESGPGLVKPSQTLSLTCTVSGGSIS

SEQ ID NO: 1393 - protein, 14 aa, Human
WIRQPAGKGLEWIG

SEQ ID NO: 1394 - protein, 32 aa, Human; identical to SEQ ID NO: 134

SEQ ID NO: 1395 - protein, 11 aa, Human
WGQGILVTVSS

SEQ ID NO: 1396 - protein, 179 aa, Human
QSALTQPASVSGSPGQSITISCTGTSSDVGAYNYVSWYQQHPGKAPKLMIYEVSNRPSGVSNRFSGSKSGNTASLTISGLQAEDEADYYCSSYTSSTFFGTGTTVTVLGQPKANPTVTLFPPSSEELQANKATLVCLISDFYPGAVTVAWKADGSPVKAGVETTTPSKQSNNKYAASSY

SEQ ID NO: 1397 - protein, 108 aa, Human
QSALTQPASVSGSPGQSITISCTGTSSDVGAYNYVSWYQQHPGKAPKLMIYEVSNRPSGVSNRFSGSKSGNTASLTISGLQAEDEADYYCSSYTSSTFFGTGTTVTVL

SEQ ID NO: 1398 - protein, 14 aa, Human
TGTSSDVGAYNYVS

SEQ ID NO: 1399 - protein, 7 aa, Human
EVSNRPS

SEQ ID NO: 1400 - protein, 8 aa, Human
SSYTSSTF

SEQ ID NO: 1401 - protein, 22 aa, Human
QSALTQPASVSGSPGQSITISC

SEQ ID NO: 1402 - protein, 15 aa, Human
WYQQHPGKAPKLMIY

SEQ ID NO: 1403 - protein, 32 aa, Human; identical to SEQ ID NO: 71

SEQ ID NO: 1404 - protein, 10 aa, Human
FGTGTTVTVL

SEQ ID NO: 1405 - protein, 159 aa, Human
EVQLVESGGGLVQPGGSLRLSCAASGLTFSSYWMSWARQAPGKGLEWVANIKKDGSEKYYVDSVKGRFTISRDNAKNSLYLQMNSLRVEDTAVYYCASEPPHYGGNSGAEYFQHWGQGTLVTVSSAPTKAPDVFPIISGCRHPKDNSPVVLACLITGYH

SEQ ID NO: 1406 - protein, 125 aa, Human
EVQLVESGGGLVQPGGSLRLSCAASGLTFSSYWMSWARQAPGKGLEWVANIKKDGSEKYYVDSVKGRFTISRDNAKNSLYLQMNSLRVEDTAVYYCASEPPHYGGNSGAEYFQHWGQGTLVTVSS

SEQ ID NO: 1407 - protein, 5 aa, Human
SYWMS

SEQ ID NO: 1408 - protein, 17 aa, Human
NIKKDGSEKYYVDSVKG

SEQ ID NO: 1409 - protein, 16 aa, Human
EPPHYGGNSGAEYFQH

SEQ ID NO: 1410 - protein, 30 aa, Human
EVQLVESGGGLVQPGGSLRLSCAASGLTFS

SEQ ID NO: 1411 - protein, 14 aa, Human
WARQAPGKGLEWVA

SEQ ID NO: 1412 - protein, 32 aa, Human
RFTISRDNAKNSLYLQMNSLRVEDTAVYYCAS

SEQ ID NO: 1413 - protein, 11 aa, Human
WGQGTLVTVSS

SEQ ID NO: 1414 - protein, 179 aa, Human
SYVLTQPPSVSVAPGKTARITCGGNNIGSKSVHWYQQRPGQAPVLVIYYDSDRPSGIPERFSGSNSGNTATLTISRVEAGDEADYYCQVWDSSSDHHYVFGTGTKVTVLGQPKANPTVTLFPPSSEELQANKATLVCLISDFYPGAVTVAWKADSSPVKAGVETTKPSKQSNNKYAASS

SEQ ID NO: 1415 - protein, 109 aa, Human
SYVLTQPPSVSVAPGKTARITCGGNNIGSKSVHWYQQRPGQAPVLVIYYDSDRPSGIPERFSGSNSGNTATLTISRVEAGDEADYYCQVWDSSSDHHYVFGTGTKVTVL

SEQ ID NO: 1416 - protein, 11 aa, Human
GGNNIGSKSVH

SEQ ID NO: 1417 - protein, 7 aa, Human
YDSDRPS

SEQ ID NO: 1418 - protein, 12 aa, Human
QVWDSSSDHHYV

SEQ ID NO: 1419 - protein, 22 aa, Human
SYVLTQPPSVSVAPGKTARITC

SEQ ID NO: 1420 - protein, 15 aa, Human
WYQQRPGQAPVLVIY

SEQ ID NO: 1421 - protein, 32 aa, Human; identical to SEQ ID NO: 17

SEQ ID NO: 1422 - protein, 10 aa, Human
FGTGTKVTVL

SEQ ID NO: 1423 - protein, 183 aa, Human
QVQLVQSGAEVKKPGASVKVSCKASGYIFTGYYMHWVRQAPGQGLEWMGWINPNSGGTNYAQKFQGRVTMTRDTSITTAYMELSRLRSDDTAFYYCARVKRFSIFGVELDYWGQGTLVTVSSASTKGPSVFPLAPSSKSTSGGTAALGCLVKDYFPEPVTVSWNSGALTSGVHTFPAVLQSSG

SEQ ID NO: 1424 - protein, 122 aa, Human
QVQLVQSGAEVKKPGASVKVSCKASGYIFTGYYMHWVRQAPGQGLEWMGWINPNSGGTNYAQKFQGRVTMTRDTSITTAYMELSRLRSDDTAFYYCARVKRFSIFGVELDYWGQGTLVTVSS

SEQ ID NO: 1425 - protein, 5 aa, Human
GYYMH

SEQ ID NO: 1426 - protein, 17 aa, Human
WINPNSGGTNYAQKFQG

SEQ ID NO: 1427 - protein, 13 aa, Human
VKRFSIFGVELDY

SEQ ID NO: 1428 - protein, 30 aa, Human
QVQLVQSGAEVKKPGASVKVSCKASGYIFT

SEQ ID NO: 1429 - protein, 14 aa, Human
WVRQAPGQGLEWMG

SEQ ID NO: 1430 - protein, 32 aa, Human
RVTMTRDTSITTAYMELSRLRSDDTAFYYCAR

SEQ ID NO: 1431 - protein, 11 aa, Human
WGQGTLVTVSS

SEQ ID NO: 1432 - protein, 181 aa, Human
QSALTQPPSASGSPGQSVTISCTGTSSDVGGYNYVSWYQQHPGKAPKLMIYEVSKRPSGVPDRFSGSKSGNTASLTVSGLQAEDEADYFCSSYADSNNLVFGGGTKLTVLGQPKAAPSVTLFPPSSEELQANKATLVCLISDFCPGAVTVAWKADSSPVKAGVETTTPSKQSNNKYAASSY

SEQ ID NO: 1433 - protein, 110 aa, Human
QSALTQPPSASGSPGQSVTISCTGTSSDVGGYNYVSWYQQHPGKAPKLMIYEVSKRPSGVPDRFSGSKSGNTASLTVSGLQAEDEADYFCSSYADSNNLVFGGGTKLTVL

SEQ ID NO: 1434 - protein, 14 aa, Human
TGTSSDVGGYNYVS

SEQ ID NO: 1435 - protein, 7 aa, Human
EVSKRPS

SEQ ID NO: 1436 - protein, 10 aa, Human
SSYADSNNLV

SEQ ID NO: 1437 - protein, 22 aa, Human
QSALTQPPSASGSPGQSVTISC

SEQ ID NO: 1438 - protein, 15 aa, Human
WYQQHPGKAPKLMIY

SEQ ID NO: 1439 - protein, 32 aa, Human
GVPDRFSGSKSGNTASLTVSGLQAEDEADYFC

SEQ ID NO: 1440 - protein, 10 aa, Human
FGGGTKLTVL

SEQ ID NO: 1441 - protein, 134 aa, Human
QVQLQESGPGLVKPSETLSLTCTVSGGSISSYYWSWIRQPPGKGLEWIGYIYYSGSTNYNPSLKSRVTISVDTSKNQFSLKLSSVTAADTAVYYCARHQSRWNIVATMDFDYWGQGTLVTVSSASTKGPSVFPL

SEQ ID NO: 1442 - protein, 123 aa, Human
QVQLQESGPGLVKPSETLSLTCTVSGGSISSYYWSWIRQPPGKGLEWIGYIYYSGSTNYNPSLKSRVTISVDTSKNQFSLKLSSVTAADTAVYYCARHQSRWNIVATMDFDYWGQGTLVTVSS

SEQ ID NO: 1443 - protein, 5 aa, Human
SYYWS

SEQ ID NO: 1444 - protein, 16 aa, Human
YIYYSGSTNYNPSLKS

SEQ ID NO: 1445 - protein, 15 aa, Human
HQSRWNIVATMDFDY

SEQ ID NO: 1446 - protein, 30 aa, Human; identical to SEQ ID NO: 24

SEQ ID NO: 1447 - protein, 14 aa, Human
WIRQPPGKGLEWIG

SEQ ID NO: 1448 - protein, 32 aa, Human; identical to SEQ ID NO: 134

SEQ ID NO: 1449 - protein, 11 aa, Human
WGQGTLVTVSS

SEQ ID NO: 1450 - protein, 187 aa, Human
DIQMTQSPSSLSASVGDRVTITCRASQSIRSYLNWYQQKPGKAPKLLIYAASSLQSGVPSRFSGSGSGTDFTLTIGSLQPEDFATYYCQQSYSTSVAFGQGTKVEIKRTVAAPSVFIFPPSDEQLKSGTASVVCLLNNFYPREAKVQWKVDNALQSGNSQESVTEQDSKDSTYSLSSTLTLSKADYE

SEQ ID NO: 1451 - protein, 107 aa, Human
DIQMTQSPSSLSASVGDRVTITCRASQSIRSYLNWYQQKPGKAPKLLIYAASSLQSGVPSRFSGSGSGTDFTLTIGSLQPEDFATYYCQQSYSTSVAFGQGTKVEIK

SEQ ID NO: 1452 - protein, 11 aa, Human
RASQSIRSYLN

SEQ ID NO: 1453 - protein, 7 aa, Human
AASSLQS

SEQ ID NO: 1454 - protein, 9 aa, Human
QQSYSTSVA

SEQ ID NO: 1455 - protein, 23 aa, Human
DIQMTQSPSSLSASVGDRVTITC

SEQ ID NO: 1456 - protein, 15 aa, Human
WYQQKPGKAPKLLIY

SEQ ID NO: 1457 - protein, 32 aa, Human
GVPSRFSGSGSGTDFTLTIGSLQPEDFATYYC

SEQ ID NO: 1458 - protein, 10 aa, Human
FGQGTKVEIK

SEQ ID NO: 1459 - protein, 185 aa, Human; identical to SEQ ID NO: 1387

SEQ ID NO: 1460 - protein, 124 aa, Human; identical to SEQ ID NO: 1388

SEQ ID NO: 1461 - protein, 7 aa, Human
SGSYYWS

SEQ ID NO: 1462 - protein, 16 aa, Human
RFHTSGSTNYNPSLKS

SEQ ID NO: 1463 - protein, 14 aa, Human
DLKGKTWIQTPFDY

SEQ ID NO: 1464 - protein, 30 aa, Human; identical to SEQ ID NO: 1392

SEQ ID NO: 1465 - protein, 14 aa, Human
WIRQPAGKGLEWIG

SEQ ID NO: 1466 - protein, 32 aa, Human; identical to SEQ ID NO: 134

SEQ ID NO: 1467 - protein, 11 aa, Human
WGQGILVTVSS

SEQ ID NO: 1468 - protein, 179 aa, Human; identical to SEQ ID NO: 1396

SEQ ID NO: 1469 - protein, 108 aa, Human; identical to SEQ ID NO: 1397

SEQ ID NO: 1470 - protein, 14 aa, Human
TGTSSDVGAYNYVS

SEQ ID NO: 1471 - protein, 7 aa, Human
EVSNRPS

SEQ ID NO: 1472 - protein, 8 aa, Human
SSYTSSTF

SEQ ID NO: 1473 - protein, 22 aa, Human
QSALTQPASVSGSPGQSITISC

SEQ ID NO: 1474 - protein, 15 aa, Human
WYQQHPGKAPKLMIY

SEQ ID NO: 1475 - protein, 32 aa, Human; identical to SEQ ID NO: 71

SEQ ID NO: 1476 - protein, 10 aa, Human
FGTGTTVTVL

SEQ ID NO: 1477 - protein, 183 aa, Human
QVQLVQSGAEVKKPGASVKVSCKASGYTFTGYYMHWVRQAPGQGLEWMGWINPNSGGTNYAQKFQGRVTMTRDTSINTAYMELSRLRSDDTAVYYCTRVGRFSIFGVELDYWGQGTLVTVSSASTKGPSVFPLAPSSKSTSGGTAALGCLVKDYFPEPVTVSWNSGALTSGVHTFPAVLQSSG

SEQ ID NO: 1478 - protein, 122 aa, Human
QVQLVQSGAEVKKPGASVKVSCKASGYTFTGYYMHWVRQAPGQGLEWMGWINPNSGGTNYAQKFQGRVTMTRDTSINTAYMELSRLRSDDTAVYYCTRVGRFSIFGVELDYWGQGTLVTVSS

SEQ ID NO: 1479 - protein, 5 aa, Human
GYYMH

SEQ ID NO: 1480 - protein, 17 aa, Human
WINPNSGGTNYAQKFQG

SEQ ID NO: 1481 - protein, 13 aa, Human
VGRFSIFGVELDY

SEQ ID NO: 1482 - protein, 30 aa, Human; identical to SEQ ID NO: 222

SEQ ID NO: 1483 - protein, 14 aa, Human
WVRQAPGQGLEWMG

SEQ ID NO: 1484 - protein, 32 aa, Human
RVTMTRDTSINTAYMELSRLRSDDTAVYYCTR

SEQ ID NO: 1485 - protein, 11 aa, Human
WGQGTLVTVSS

SEQ ID NO: 1486 - protein, 180 aa, Human
QSALTQPPSASGSPGQSVTISCTGTSSDVGGYNYVSWYQQHPGKAPKLMIYEVNKRPSGVPDRFSGSKSGNTASLTVSGLQADDEADYYCSSYAGSNNLVFGGGTKLTVLGQPKAAPSVTLFPPSSEELQANKATLVCLISDFYPGAVTVAWKADSSPVKAGVETTTPSKQSNNKYAASS

SEQ ID NO: 1487 - protein, 110 aa, Human
QSALTQPPSASGSPGQSVTISCTGTSSDVGGYNYVSWYQQHPGKAPKLMIYEVNKRPSGVPDRFSGSKSGNTASLTVSGLQADDEADYYCSSYAGSNNLVFGGGTKLTVL

SEQ ID NO: 1488 - protein, 14 aa, Human
TGTSSDVGGYNYVS

SEQ ID NO: 1489 - protein, 7 aa, Human
EVNKRPS

SEQ ID NO: 1490 - protein, 10 aa, Human
SSYAGSNNLV

SEQ ID NO: 1491 - protein, 22 aa, Human
QSALTQPPSASGSPGQSVTISC

SEQ ID NO: 1492 - protein, 15 aa, Human
WYQQHPGKAPKLMIY

SEQ ID NO: 1493 - protein, 32 aa, Human
GVPDRFSGSKSGNTASLTVSGLQADDEADYYC

SEQ ID NO: 1494 - protein, 10 aa, Human
FGGGTKLTVL

SEQ ID NO: 1495 - protein, 185 aa, Human
QVLLVQSGAEVKKPGASVKVSCKASGYTFTGYYLHWVRQAPGQGLEWMGWINPISGGTNYAQNFQDRVTMTRDTSIITAYMELSRLRSDDTAVYYCARLAYYYDSSAYRGAFDIWGQGTMVTVSSASTKGPSVFPLAPSSKSTSGGTAALGCLVKDYFPEPVTVSWNSGALTSGVHTFPAVLQSS

SEQ ID NO: 1496 - protein, 125 aa, Human
QVLLVQSGAEVKKPGASVKVSCKASGYTFTGYYLHWVRQAPGQGLEWMGWINPISGGTNYAQNFQDRVTMTRDTSIITAYMELSRLRSDDTAVYYCARLAYYYDSSAYRGAFDIWGQGTMVTVSS

SEQ ID NO: 1497 - protein, 5 aa, Human
GYYLH

SEQ ID NO: 1498 - protein, 17 aa, Human
WINPISGGTNYAQNFQD

SEQ ID NO: 1499 - protein, 16 aa, Human
LAYYYDSSAYRGAFDI

SEQ ID NO: 1500 - protein, 30 aa, Human
QVLLVQSGAEVKKPGASVKVSCKASGYTFT

SEQ ID NO: 1501 - protein, 14 aa, Human
WVRQAPGQGLEWMG

SEQ ID NO: 1502 - protein, 32 aa, Human
RVTMTRDTSIITAYMELSRLRSDDTAVYYCAR

SEQ ID NO: 1503 - protein, 11 aa, Human
WGQGTMVTVSS

SEQ ID NO: 1504 - protein, 180 aa, Human
QSALTQPASVSGSPGQSITISCTGTSSDVGGYNYVSWYQQHPGKAPKLMIYEVSNRPSGVSDRFSGSKSGNTASLTISGLQAEDEADYYCSSYTSSSTYVFGTGTKVTVLGQPKANPTVTLFPPSSEELQANKATLVCLISDFYPGAVTVAWKADGSPVKAGVETTKPSKQSNNKYAASS

SEQ ID NO: 1505 - protein, 110 aa, Human
QSALTQPASVSGSPGQSITISCTGTSSDVGGYNYVSWYQQHPGKAPKLMIYEVSNRPSGVSDRFSGSKSGNTASLTISGLQAEDEADYYCSSYTSSSTYVFGTGTKVTVL

SEQ ID NO: 1506 - protein, 14 aa, Human
TGTSSDVGGYNYVS

SEQ ID NO: 1507 - protein, 7 aa, Human
EVSNRPS

SEQ ID NO: 1508 - protein, 10 aa, Human
SSYTSSSTYV

SEQ ID NO: 1509 - protein, 22 aa, Human
QSALTQPASVSGSPGQSITISC

SEQ ID NO: 1510 - protein, 15 aa, Human
WYQQHPGKAPKLMIY

SEQ ID NO: 1511 - protein, 32 aa, Human
GVSDRFSGSKSGNTASLTISGLQAEDEADYYC

SEQ ID NO: 1512 - protein, 10 aa, Human
FGTGTKVTVL

SEQ ID NO: 1513 - protein, 188 aa, Human
QVQLVESGGGVVQPGRSLRLSCAASGFTFSYYGMHWVRQAPGKGLEWVAVIWYDGSNKHYADSVKGRFTISRDNSKNTLYLQMNSLRAEDTAVYYCAKNAAPYCSGGSCYGTYFDYWGQGTLVTVSSASTKGPSVFPLAPSSKSTSGGTAALGCLVKDYFPEPVTVSWNSGALTSGVHTFPAVLQSSG

SEQ ID NO: 1514 - protein, 127 aa, Human
QVQLVESGGGVVQPGRSLRLSCAASGFTFSYYGMHWVRQAPGKGLEWVAVIWYDGSNKHYADSVKGRFTISRDNSKNTLYLQMNSLRAEDTAVYYCAKNAAPYCSGGSCYGTYFDYWGQGTLVTVSS

SEQ ID NO: 1515 - protein, 5 aa, Human
YYGMH

SEQ ID NO: 1516 - protein, 17 aa, Human
VIWYDGSNKHYADSVKG

SEQ ID NO: 1517 - protein, 18 aa, Human
NAAPYCSGGSCYGTYFDY

SEQ ID NO: 1518 - protein, 30 aa, Human; identical to SEQ ID NO: 168

SEQ ID NO: 1519 - protein, 14 aa, Human
WVRQAPGKGLEWVA

SEQ ID NO: 1520 - protein, 32 aa, Human; identical to SEQ ID NO: 692

SEQ ID NO: 1521 - protein, 11 aa, Human
WGQGTLVTVSS

SEQ ID NO: 1522 - protein, 188 aa, Human
DIQMTQSPSSLSASVGDRVTITCQASQDINNYLNWYQQKPGKAPKLLIYDASNLETGVPSRFSGSGSGTDFTFTISSLQPEDIATYYCQQYDNVPPHTFGQGTKLEIKRTVAAPSVFIFPPSDEQLKSGTASVVCLLNNFYPREAKVQWKVDNALQSGNSQESVTEQDSKDSTYSLSSTLTLSKADYE

SEQ ID NO: 1523 - protein, 108 aa, Human
DIQMTQSPSSLSASVGDRVTITCQASQDINNYLNWYQQKPGKAPKLLIYDASNLETGVPSRFSGSGSGTDFTFTISSLQPEDIATYYCQQYDNVPPHTFGQGTKLEIK

SEQ ID NO: 1524 - protein, 11 aa, Human
QASQDINNYLN

SEQ ID NO: 1525 - protein, 7 aa, Human
DASNLET

SEQ ID NO: 1526 - protein, 10 aa, Human
QQYDNVPPHT

SEQ ID NO: 1527 - protein, 23 aa, Human
DIQMTQSPSSLSASVGDRVTITC

SEQ ID NO: 1528 - protein, 15 aa, Human
WYQQKPGKAPKLLIY

SEQ ID NO: 1529 - protein, 32 aa, Human
GVPSRFSGSGSGTDFTFTISSLQPEDIATYYC

SEQ ID NO: 1530 - protein, 10 aa, Human
FGQGTKLEIK

SEQ ID NO: 1531 - protein, 146 aa, Human
QVQLVQSGAEVKKPGSSVKVSCKASGGTFSSYAISWVRQAPGQGLEWMGGIIPIFGTAKYAQKFQGRVTITADESTSTAYMELSSLRSEDTAVYYCARGKDGYNPWGAFDIWGQGTMVTVSSGSASAPTLFPLVSCENSPSDTSSV

SEQ ID NO: 1532 - protein, 122 aa, Human
QVQLVQSGAEVKKPGSSVKVSCKASGGTFSSYAISWVRQAPGQGLEWMGGIIPIFGTAKYAQKFQGRVTITADESTSTAYMELSSLRSEDTAVYYCARGKDGYNPWGAFDIWGQGTMVTVSS

SEQ ID NO: 1533 - protein, 5 aa, Human
SYAIS

SEQ ID NO: 1534 - protein, 17 aa, Human
GIIPIFGTAKYAQKFQG

SEQ ID NO: 1535 - protein, 13 aa, Human
GKDGYNPWGAFDI

SEQ ID NO: 1536 - protein, 30 aa, Human; identical to SEQ ID NO: 384

SEQ ID NO: 1537 - protein, 14 aa, Human
WVRQAPGQGLEWMG

SEQ ID NO: 1538 - protein, 32 aa, Human
RVTITADESTSTAYMELSSLRSEDTAVYYCAR

SEQ ID NO: 1539 - protein, 11 aa, Human
WGQGTMVTVSS

SEQ ID NO: 1540 - protein, 193 aa, Human
QSALTQPPSASGSPGQSVTISCTGTSSDVGGYNYVSWYQQHPGKAPKLMIYEVSKRPSGVPDRFSGSKSGNTASLTVSGLQAEDEADYYCSSYAGSNNFGVFGGGTKLTVLGQPKAAPSVTLFPPSSEELQANKATLVCLISDFYPGAVTVAWKADSSPVKAGVETTTPSKQSNNKYAASSYLSLTPEQWKSH

SEQ ID NO: 1541 - protein, 111 aa, Human
QSALTQPPSASGSPGQSVTISCTGTSSDVGGYNYVSWYQQHPGKAPKLMIYEVSKRPSGVPDRFSGSKSGNTASLTVSGLQAEDEADYYCSSYAGSNNFGVFGGGTKLTVL

SEQ ID NO: 1542 - protein, 14 aa, Human
TGTSSDVGGYNYVS

SEQ ID NO: 1543 - protein, 7 aa, Human
EVSKRPS

SEQ ID NO: 1544 - protein, 11 aa, Human
SSYAGSNNFGV

SEQ ID NO: 1545 - protein, 22 aa, Human
QSALTQPPSASGSPGQSVTISC

SEQ ID NO: 1546 - protein, 15 aa, Human
WYQQHPGKAPKLMIY

SEQ ID NO: 1547 - protein, 32 aa, Human
GVPDRFSGSKSGNTASLTVSGLQAEDEADYYC

SEQ ID NO: 1548 - protein, 10 aa, Human
FGGGTKLTVL

SEQ ID NO: 1549 - protein, 177 aa, Human
EVQLVESGGGLVQPGGSLRLSCVASGFTFSDYAMHWVRQAPGKGLEYIAAISSNGGRTYYADSVKDKFTISRDNSKNILYLHMGSLRAEDTAVYFCARDPQSWVTSTTAHFQHWGQGTLVTVSSASPTSPKVFPLSLCSTQPDGNVVIACLVQGFFPQEPLSVTWSESGQGVTARNF

SEQ ID NO: 1550 - protein, 124 aa, Human
EVQLVESGGGLVQPGGSLRLSCVASGFTFSDYAMHWVRQAPGKGLEYIAAISSNGGRTYYADSVKDKFTISRDNSKNILYLHMGSLRAEDTAVYFCARDPQSWVTSTTAHFQHWGQGTLVTVSS

SEQ ID NO: 1551 - protein, 5 aa, Human
DYAMH

SEQ ID NO: 1552 - protein, 17 aa, Human
AISSNGGRTYYADSVKD

SEQ ID NO: 1553 - protein, 15 aa, Human
DPQSWVTSTTAHFQH

SEQ ID NO: 1554 - protein, 30 aa, Human
EVQLVESGGGLVQPGGSLRLSCVASGFTFS

SEQ ID NO: 1555 - protein, 14 aa, Human
WVRQAPGKGLEYIA

SEQ ID NO: 1556 - protein, 32 aa, Human
KFTISRDNSKNILYLHMGSLRAEDTAVYFCAR

SEQ ID NO: 1557 - protein, 11 aa, Human
WGQGTLVTVSS

SEQ ID NO: 1558 - protein, 181 aa, Human
QSALTQPASVSGSPGQSITISCTGTSSDIGGYNYVSWYQQHPGKAPKLIISDVSNRPSGVSSRFSGSKSGNTASLTISGLQTEDEAHYYCSSFRSGITLGVFGGGTKLTVLGQPKAAPSVTLFPPSSEELQANKATLVCLISDFYPGAVTVAWKADSSPVKAGVETTTPSKQSNNKYAASS

SEQ ID NO: 1559 - protein, 111 aa, Human
QSALTQPASVSGSPGQSITISCTGTSSDIGGYNYVSWYQQHPGKAPKLIISDVSNRPSGVSSRFSGSKSGNTASLTISGLQTEDEAHYYCSSFRSGITLGVFGGGTKLTVL

SEQ ID NO: 1560 - protein, 14 aa, Human
TGTSSDIGGYNYVS

SEQ ID NO: 1561 - protein, 7 aa, Human
DVSNRPS

SEQ ID NO: 1562 - protein, 11 aa, Human
SSFRSGITLGV

SEQ ID NO: 1563 - protein, 22 aa, Human
QSALTQPASVSGSPGQSITISC

SEQ ID NO: 1564 - protein, 15 aa, Human
WYQQHPGKAPKLIIS

SEQ ID NO: 1565 - protein, 32 aa, Human
GVSSRFSGSKSGNTASLTISGLQTEDEAHYYC

SEQ ID NO: 1566 - protein, 10 aa, Human
FGGGTKLTVL

SEQ ID NO: 1567 - protein, 183 aa, Human
QVQLVQSGAEVKKPGASVKVSCKASGYTFTGYYMHWVRQAPGQGLEWMGWINPNSGAINYAQKFQGRVTMTRDTSISTAYMELSSLRSDDTAVYYCARVGRFSIFGVELDNWGQGTLVTVSSASTKGPSVFPLAPSSKSTSGGTAALGCLVKDYFPEPVTVSWNSGALTSGVHTFPAVLQSSG

SEQ ID NO: 1568 - protein, 122 aa, Human
QVQLVQSGAEVKKPGASVKVSCKASGYTFTGYYMHWVRQAPGQGLEWMGWINPNSGAINYAQKFQGRVTMTRDTSISTAYMELSSLRSDDTAVYYCARVGRFSIFGVELDNWGQGTLVTVSS

SEQ ID NO: 1569 - protein, 5 aa, Human
GYYMH

SEQ ID NO: 1570 - protein, 17 aa, Human
WINPNSGAINYAQKFQG

SEQ ID NO: 1571 - protein, 13 aa, Human
VGRFSIFGVELDN

SEQ ID NO: 1572 - protein, 30 aa, Human; identical to SEQ ID NO: 222

SEQ ID NO: 1573 - protein, 14 aa, Human
WVRQAPGQGLEWMG

SEQ ID NO: 1574 - protein, 32 aa, Human
RVTMTRDTSISTAYMELSSLRSDDTAVYYCAR

SEQ ID NO: 1575 - protein, 11 aa, Human
WGQGTLVTVSS

SEQ ID NO: 1576 - protein, 192 aa, Human
QSALTQPPSASGSPGQSVTISCTGTSSDVGGYNFVSWYQQHPGKAPKLMIYEVSKRPSGVPDRFSGSKSGNTASLTVSGLQAEDEADYYCSSYGGSNNLIFGGGTRLTVLGQPKAAPSVTLFPPSSEELQANKATLVCLISDFYPGAVTVAWKADSSPVKAGVETTTPSKQSNNKYAASSYLSLTPEQWKSH

SEQ ID NO: 1577 - protein, 110 aa, Human
QSALTQPPSASGSPGQSVTISCTGTSSDVGGYNFVSWYQQHPGKAPKLMIYEVSKRPSGVPDRFSGSKSGNTASLTVSGLQAEDEADYYCSSYGGSNNLIFGGGTRLTVL

SEQ ID NO: 1578 - protein, 14 aa, Human
TGTSSDVGGYNFVS

SEQ ID NO: 1579 - protein, 7 aa, Human
EVSKRPS

SEQ ID NO: 1580 - protein, 10 aa, Human
SSYGGSNNLI

SEQ ID NO: 1581 - protein, 22 aa, Human
QSALTQPPSASGSPGQSVTISC

SEQ ID NO: 1582 - protein, 15 aa, Human
WYQQHPGKAPKLMIY

SEQ ID NO: 1583 - protein, 32 aa, Human; identical to SEQ ID NO: 1547

SEQ ID NO: 1584 - protein, 10 aa, Human
FGGGTRLTVL

SEQ ID NO: 1585 - protein, 146 aa, Human
QVQLQESGPGLVKPSETLSLTCTVSGGSISSYYWSWIRQPPGKGLEWIGYIYYSGSTKYNPSLKSRVTISVDTSKKQFSLKLSSVTAADTAVYYCARHIKIGVVGGLTFDFWGQGTLVTVSSGSASAPTLFPLVSCENSPSDTSSV

SEQ ID NO: 1586 - protein, 122 aa, Human
QVQLQESGPGLVKPSETLSLTCTVSGGSISSYYWSWIRQPPGKGLEWIGYIYYSGSTKYNPSLKSRVTISVDTSKKQFSLKLSSVTAADTAVYYCARHIKIGVVGGLTFDFWGQGTLVTVSS

SEQ ID NO: 1587 - protein, 5 aa, Human
SYYWS

SEQ ID NO: 1588 - protein, 16 aa, Human
YIYYSGSTKYNPSLKS

SEQ ID NO: 1589 - protein, 14 aa, Human
HIKIGVVGGLTFDF

SEQ ID NO: 1590 - protein, 30 aa, Human; identical to SEQ ID NO: 24

SEQ ID NO: 1591 - protein, 14 aa, Human
WIRQPPGKGLEWIG

SEQ ID NO: 1592 - protein, 32 aa, Human
RVTISVDTSKKQFSLKLSSVTAADTAVYYCAR

SEQ ID NO: 1593 - protein, 11 aa, Human
WGQGTLVTVSS

SEQ ID NO: 1594 - protein, 153 aa, Human
DIQMTQSPSSLSASIGDRVTITCRASQSISTYLNWYQQKPGKAPKLLIYAASSLQSGVPSRFSGSGSGADFTLTISSLQPEDFATYYCQQSYSTPLTFGGGTKVEIKRTVAAPSVFIFPPSDEQLKSGTASVVCLLNNFYPREAKVQWKVDNA

SEQ ID NO: 1595 - protein, 107 aa, Human
DIQMTQSPSSLSASIGDRVTITCRASQSISTYLNWYQQKPGKAPKLLIYAASSLQSGVPSRFSGSGSGADFTLTISSLQPEDFATYYCQQSYSTPLTFGGGTKVEIK

SEQ ID NO: 1596 - protein, 11 aa, Human
RASQSISTYLN

SEQ ID NO: 1597 - protein, 7 aa, Human
AASSLQS

SEQ ID NO: 1598 - protein, 9 aa, Human
QQSYSTPLT

SEQ ID NO: 1599 - protein, 23 aa, Human
DIQMTQSPSSLSASIGDRVTITC

SEQ ID NO: 1600 - protein, 15 aa, Human
WYQQKPGKAPKLLIY

SEQ ID NO: 1601 - protein, 32 aa, Human
GVPSRFSGSGSGADFTLTISSLQPEDFATYYC

SEQ ID NO: 1602 - protein, 10 aa, Human
FGGGTKVEIK

SEQ ID NO: 1603 - protein, 146 aa, Human
QVQLVQSGAEVKKPGASVKVSCKASGYTFTGYYMHWVRQAPGQGLEWMGWINPNSGGTNYAQKFQGRVTMTRDTSISTAYMELSRLRCDDTAVYYCARASTPYSSGSWADYWGQGTLVTVSSGSASAPTLFPLVSCENSPSDTSSV

SEQ ID NO: 1604 - protein, 122 aa, Human
QVQLVQSGAEVKKPGASVKVSCKASGYTFTGYYMHWVRQAPGQGLEWMGWINPNSGGTNYAQKFQGRVTMTRDTSISTAYMELSRLRCDDTAVYYCARASTPYSSGSWADYWGQGTLVTVSS

SEQ ID NO: 1605 - protein, 5 aa, Human
GYYMH

SEQ ID NO: 1606 - protein, 17 aa, Human
WINPNSGGTNYAQKFQG

SEQ ID NO: 1607 - protein, 13 aa, Human
ASTPYSSGSWADY

SEQ ID NO: 1608 - protein, 30 aa, Human; identical to SEQ ID NO: 222

SEQ ID NO: 1609 - protein, 14 aa, Human
WVRQAPGQGLEWMG

SEQ ID NO: 1610 - protein, 32 aa, Human
RVTMTRDTSISTAYMELSRLRCDDTAVYYCAR

SEQ ID NO: 1611 - protein, 11 aa, Human
WGQGTLVTVSS

SEQ ID NO: 1612 - protein, 185 aa, Human
QSALTQPASVSGSPGQSITISCTGTSSDVGGYNYVSWYQQHPGKAPKLMIYDVSNRPSGVSNRFSGSKSGNTASLTISGLQAEDEADYYCSSYASSSTWVFGGGTKLTVLGQPKAAPSVTLFPPSSEELQANKATLVCLISDFYPGAVTVAWKADSSPVKAGVETTTPSKQSNNKYAASSYLSLT

SEQ ID NO: 1613 - protein, 110 aa, Human
QSALTQPASVSGSPGQSITISCTGTSSDVGGYNYVSWYQQHPGKAPKLMIYDVSNRPSGVSNRFSGSKSGNTASLTISGLQAEDEADYYCSSYASSSTWVFGGGTKLTVL

SEQ ID NO: 1614 - protein, 14 aa, Human
TGTSSDVGGYNYVS

SEQ ID NO: 1615 - protein, 7 aa, Human
DVSNRPS

SEQ ID NO: 1616 - protein, 10 aa, Human
SSYASSSTWV

SEQ ID NO: 1617 - protein, 22 aa, Human
QSALTQPASVSGSPGQSITISC

SEQ ID NO: 1618 - protein, 15 aa, Human
WYQQHPGKAPKLMIY

SEQ ID NO: 1619 - protein, 32 aa, Human; identical to SEQ ID NO: 71

SEQ ID NO: 1620 - protein, 10 aa, Human
FGGGTKLTVL

SEQ ID NO: 1621 - DNA, 546 bp, Human
caggtgcagctgcaggagtcgggcccaggactggtgaggccttcggagaccctgtccctcacctgcactgtctctggtggctccatcagtagtcactactggagctggatccggcagccccccgggaagggactggagtggattgggtatatctattatagtgggagcaccaattacaacccctccctcaagagtcgagtcaccatatcagtagacacgtccaagaaccagttctccctgaaacttatctctgtgaccgctgcggacacggccgtgtattactgtgcgagagccgggggcgtttttggagtggttctggactttgaccactggggccggggaaccctggtcaccgtctcctcagcctccaccaagggcccatcggtcttccccctggcaccctcctccaagagcacctctgggggcacagcggccctgggctgcctggtcaaggactacttccccgaaccggtgacggtgtcgtggaactcaggcgccctgaccagcggcgtgcacaccttcccggctgtcctacagtcctcagga

SEQ ID NO: 1622 - DNA, 549 bp, Human
caggtgcagctgcaggagtcgggcccaggactggtgaagccttcggagaccctgtccctcacctgcactgtctctggtggctccatcagtagtttctactggggctggatccggcagcccgccgggaagggactggagtggattgggcgtttccatactagtgggagcaccaactacaacccctccttcaagagtcgagtcaccatgtcagtagacacgtccaagaaccagttctccctgaagctgacctctgtgaccgccgcggacacggccgtgtattactgtgcgagcggccggggcagcagctggtacgtaggctggttcttcgatctctggggccgtggcaccctggtcactgtctcctcagcctccaccaagggcccatcggtcttccccctggcaccctcctccaagagcacctctgggggcacagcagccctgggctgcctggtcaaggactacttccccgaaccggtgacggtgtcgtggaactcaggcgccctgaccagcggcgtgcacaccttcccggctgtcctacagtcctcagga

SEQ ID NO: 1623 - DNA, 549 bp, Human
caggtccaactcatacagtcaggggctgaggtgaagaagcctggggcctcagtgaaggtctcctgcacggcctccggatactccctcaatgagttgcccatacagtgggtgcggcaggctcctggtaaagggcttgagtggatgggagaatttgatcccgaagatggtgaaacaatctacgcagagaaattccagggcagagtcaccctgaccgaggaaacatctacaaacacagcctacatggagttgagcagcctgaaatctgaggacacggccgcgtatttttgttcaaccggctcgactattggcgtcgtcatttatgcttttgctatctggggccaagggacaatggtcaccgtctcttcagcttccaccaagggcccatcggtcttccccctggcgccctgctccaggagcacctccgagagcacagccgccctgggctgcctggtcaaggactacttccccgaaccggtgacggtgtcgtggaactcaggcgccctgaccagcggcgtgcacaccttcccggctgtcctacagtcctcagga

SEQ ID NO: 1624 - DNA, 423 bp, Human
caggtgcagctgcaggagtcgggcccaggactggtgaagccttcggagaccctgtccctcacctgcactgtctctggtggctccatcagtagttactactggagctggatccggcagcccgccgggaagggactggagtggattgggcgtatctataccagtgggagcaccaactacaacccctccctcaagagtcgagtcaccatgtcagtagacacgtccaagaaccagttctccctgaagctgagctctgtgaccgccgcggacacggccgtgtattactgtgcgagagggggcagtggctggcgctttgactactggggccagggaaccctggtcaccgtctcctcagggagtgcatccgccccaacccttttccccctcgtctcctgtgagaattccccgtcggatacgagcagcgtg

SEQ ID NO: 1625 - DNA, 552 bp, Human
caggtgcagctgcaggagtcgggcccaggactggtgaagccttcacagaccctgtccctcacctgcactgtctctggtggctccatcaacagtggtgattactactggagctggatccgccagcccccagggaagggcctggagtggattgggtacatctatttcagtgggagcacctactacaacccgtccctcaagagtcgagttaccatatcactagacaggtccaagaaccagttctccctgaagctgagctctgtgactgccgcagacacggccgtgtattactgtgccagagaggaaagtatgattacgcttgggggagttatcgtcgactggggccagggaaccctggtcaccgtctcctcagcctccaccaagggcccatcggtcttccccctggcaccctcctccaagagcacctctgggggcacagcagccctgggctgcctggtcaaggactacttccccgaaccggtgacggtgtcgtggaactcaggcgccctgaccagcggcgtgcacaccttcccggctgtcctacagtcctcagga

SEQ ID NO: 1626 - DNA, 546 bp, Human
caggtgcagctgcaggagtcgggcccaggactggtgaagccttcggagaccctgtccctcacctgcactgtctctggtggctccatcagtagtcactactggagctggatccggcagcccccagggaagggactggagcagattgggtatatgtattacagtgggagcaccaactacaacccctccctcaagagtcgagtcatcatatcagtagacacgtccaagaaccagttctccctgaagttgagctctgtgaccgctgcggacacggccgtgtattactgtgcgggtcgtgaccagctgttatacggggccgatggttttgatatctggggccaagggacaatggtcaccgtctcttcagcctccaccaagggcccatcggtcttccccctggcaccctcctccaagagcacctctgggggcacagcggccctgggctgcctggtcaaggactacttccccgaaccggtgacggtgtcgtggaactcaggcgccctgaccagcggcgtgcacaccttcccggctgtcctacagtcctcagga

SEQ ID NO: 1627 - DNA, 552 bp, Human
gaagtgcagctggtggagtctgggggaggcttggtacagcctggcaggtccctgagactctcctgtgcagcctctggattcacctttggtgactatgccatgtactgggtccggcaacctccagggaagggcctggagtgggtctcaggtattagttggaatagaggtactataggctatgcggactctgtgaagggccgattcaccatctccagagacaacgccaagaactccctgtatctgcaaatgaacagtctgacacctgaggacacggccttgtattactgtgcaaaagatatgctaccagctagtaggttcttctactacatggacgtctggggcaaagggaccacggtcatcgtctcctcagcctccaccaagggcccatcggtcttccccctggcaccctcctccaagagcacctctgggggcacagcagccctgggctgcctggtcaaggactacttccccgaaccggtgacggtgtcgtggaactcaggcgccctgaccagcggcgtgcacaccttcccggctgtcctacagtcctcagga

SEQ ID NO: 1628 - DNA, 546 bp, Human
caggtgcagctgcaggagtcgggcccaggactggtgaagccttcggagaccctgtccctcacctgcactgtctctggtggctccatcactagttactactggagctggatccggcagcccccagggaagggactggagtggattgaatatatccattacagtgggagcaccaactacaacccctccctcaagagtcgagtcaccatatcagtagacacgtccaagaaccagttctccctgaagctgagctctgtgaccgctgcggacacggccgtgtattactgtgcgagattgctcaagtatagcaggggggggtgctactttgaccactggggccagggaaccctggtcaccgtctcctcagcctccaccaagggcccatcggtcttccccctggcaccctcctccaagagcacctctgggggcacagcggccctgggctgcctggtcaaggactacttccccgaaccggtgacggtgtcgtggaactcaggcgccctgaccagcggcgtgcacaccttcccggctgtcctacagtcctcagga

SEQ ID NO: 1629 - DNA, 531 bp, Human
gaggtgcagctggtggagtctgggggaggcttggtacagccgggggggtccctgagactctcctgtgcagcctctggattcaccctcagcagctatagcatgaactgggtccgccaggctccagggaaggggctggagtgggtttcatacattagtagtagtagtagcaccatatactacgcagactctgtgaagggccgattcaccatctccaaagacaacgccaagaactcactgtatctgcaaatgaacagcctgagagccgaggacacggctgtctattactgtgcggtcggacggggatactttgtctactggggccagggaaccctggtcaccgtctcctcagcctccaccaagggcccatcggtcttccccctggcaccctcctccaagagcacctctgggggcacagcggccctgggctgcctggtcaaggactacttccccgaaccggtgacggtgtcgtggaactcaggcgccctgaccagcggcgtgcacaccttcccggctgtcctacagtcctcagga

SEQ ID NO: 1630 - DNA, 567 bp, Human
caggtgcagctggtggagtctgggggaggcgtggtccagcctgggaggtccctgagactctcctgtgcagcctctggattcaccttcagtagctatggcatgcactgggtccgccaggctccaggcaaggggctggagtgggtggcagttatatggtatgatggaagtaataaatattatgcagactccgtgaagggccgattcaccatctccagagacaattccaagaacacgctgtatctgcaaatgaacagcctgagagccgaggacacggctgtgtattactgtgcgagaatcgagggatacagctatggcgacgtgagggtctactactactacggtatggacgtctggggccaagggaccacggtcaccgtctcctcagcctccaccaagggcccatcggtcttccccctggcaccctcctccaagagcacctctgggggcacagcggccctgggctgcctggtcaaggactacttccccgaaccggtgacggtgtcgtggaactcaggcgccctgaccagcggcgtgcacaccttcccggctgtcctacagtcctcagga

SEQ ID NO: 1631 - DNA, 573 bp, Human
caggtccacctggtgcagtctggggctgaggtgaagaagcctgggtcctcggtgaaggtctcctgcaaggcttctggaggcaccttcagcagctgtgctatcagctgggtgcgacaggcccctggacaagggcttgagtggatgggaaggatcatccctatccttggtatagcaaactacgcacagaagttccagggcagagtcacgattaccgcggacaaatccacgagcacagcctacatggagctgagcagcctgagatctgaggacacggccgtgtattactgtgcgagaggatgggagtttggttcggggagttattatcgaactgattactactactacgctatggacgtctggggccaagggaccacggtcaccgtctcctcagcctccaccaagggcccatcggtcttccccctggcgccctgctccaggagcacctctgggggcacagcggccctgggctgcctggtcaaggactacttccccgaaccggtgacggtgtcgtggaactcaggcgccctgaccagcggcgtgcacaccttcccggctgtcctacagtcctcagga

SEQ ID NO: 1632 - DNA, 561 bp, Human
gaagtgcagctggtgcagtctggagcagaggtgaaaaagcccggggagtctctgaggatctcctgtaagggttctggatacagctttagcagctactggatcagctgggtgcgccagatgcccgggaaaggcctggagtggatggggaggattgatcctagtgactctaacaccaactacagcccgtccttccaaggccacgtcaccatctcagctgacaagtccatcagcactgcctacctgcagtggagcagcctgaaggcctcggacaccgccatgtattactgtgcgagactctccgtccgggtatggttcggggagttaccccattacggtatggacgtctggggccaagggaccacggtcaccgtctcctcagcctccaccaagggcccatcggtcttccccctggcaccctcctccaagagcacctctgggggcacagcggccctgggctgcctggtcaaggactacttccccgaaccggtgacggtgtcgtggaactcaggcgccctgaccagcggcgtgcacaccttcccggctgtcctacagtcctcagga

SEQ ID NO: 1633 - DNA, 564 bp, Human
caggtgcagctggtgcagtctggggctgaggtgaagaagcctggggcctcagtgaaggtctcctgcaaggcttctggatacaccttcaccggctactatatgcactgggtgcgacaggcccctggacaagggcttgagtggatgggatggatcaaccctaacagtggtgacacaaactatgcacagaagtttcagggctgggtcaccatgaccagggacacgtccctcagcacagcctacatggagctgagcaggctgaaatctgacgacacggccgtgtattactgtgcgagagtaggggttggtgaatatagtgggaggcactactactactacggtatggacgtctggggccaagggaccacggtcaccgtctcctcagcctccaccaagggcccatcggtcttccccctggcaccctcctccaagagcacctctgggggcacagcggccctgggctgcctggtcaaggactacttccccgaaccggtgacggtgtcgtggaactcaggcgccctgaccagcggcgtgcacaccttcccggctgtcctacagtcctcagga

SEQ ID NO: 1634 - DNA, 463 bp, Human
gaggtgcagctggtggagtctgggggaggcttggtacagccagggcggtccctgagactctcctgtacagcttctggattcacctttggtgattatgctatgagctggttccgccaggctccagggaaggggctggagtgggtaggtttcattagaagcaaagcttatggtgggacaacacaacacgccgcctctgtgaaaggcagattcaccatctcaagagatgattccaaaagcatcgcctatctgcaaatgaacagcctgaaaaccgaggacacagccgtgtatcactgtgctagagatggatatgattgtagtggtggtagatgctactcccatatatttgactactggggccagggaaccctggtcaccgtctcctcaggtgagtcctcaccaccccctctctgagtccacttagggagactcagcttgccagggtctcagggtcagagtcttgtag

SEQ ID NO: 1635 - DNA, 558 bp, Human
caggtgcagctgcaggagtcgggcccaggactggtgaagccttcggggaccctgtccctcacctgcgctgtctctggtggctccatcagcagtattaactggtggagttgggtccgccagcccccagggaaggggctggagtggatcggggaaatctatcatagtgggaacaccaactataacccgtccctcaagagtcgagtcaccatatcaggagacaagtccaagaaccagttctccctgaagctgagctctgtgaccgccgcggacacggccgtgtattactgtgcgagaggttactatgatagtagtccttattacgagccacagggaattgactactggggccagggaatcctggtcaccgtctcctcagcctccaccaagggcccatcggtcttccccctggcaccctcctccaagagcacctctgggggcacagcggccctgggctgcctggtcaaggactacttccccgaaccggtgacggtgtcgtggaactcaggcgccctgaccagcggcgtgcacaccttcccggctgtcctacagtcctcagga

SEQ ID NO: 1636 - DNA, 429 bp, Human
caggtgcagctggtgcagtctggggctgaggtgaagaagcctggggcctcagtgaaggtttcctgcaaggcatctggatacaccttcaccagctactttattcactgggtgcgacaggcccctggacaagggcttgagtggatgggaataatcaaccctagtggtggtagcacaagctacgcacagaagttccagggcagagtcaccatgaccagggacacgtccacgagcacagtctacatggagctgagcagcctgagatctgaggacacggccgtgtattactgtgcgagacacacaaccccgacaagatactttgactactggggccagggaaccctggtcaccgtctcctcagggagtgcatccgccccaacccttttccccctcgtctcctgtgagaattccccgtcggatacgagcagcgtg

SEQ ID NO: 1637 - DNA, 387 bp, Human
cagctgcagctgcaggagtcgggcccaggactggtgaagccttcggagaccctgtccctcacctgcactgtctctggtggctccatcagcagtagtagttactactggggctggatccgccagcccccagggaaggggctggagtggattgggagtatctattatagtgggagcacctactacaacccgtccctcaagagtcgagtcaccatatccgtagacacgtccaagaaccagttctccctgaagctgagctctgtgaccgccgcagacacggctgtgtattactgtgcgagaaagccacgtagtgactacgggtacttcgatctctggggccgtggcaccctggtcactgtctcctcagcctccaccaagggcccatcggtc

SEQ ID NO: 1638 - DNA, 573 bp, Human
gaggtgcagctggtggagtctgggggaggcttggtaaagccagggcggtccctgagactctcctgtacagcttctggattcacctttggtgattatgctatgagctggttccgccaggctccagggaaggggctggagtgggtaggtttcactagaaggaaagcttatggtgggacaacagagtacgccgcgtctgtgaaaggcagattcaccatctcaagagatgattccaaaagcatcgcctatctgcaaatgaacagcctgaaaaccgaggacacagccgtgtattactgtactagaattaaggtgggccgtttcgatcttaccgacagtgggagctaccgatactttgactactggggccagggaaccctggtcaccgtctcctcagcctccaccaagggcccatcggtcttccccctggcaccctcctccaagagcacctctgggggcacagcggccctgggctgcctggtcaaggactacttccccgaaccggtgacggtgtcgtggaactcaggcgccctgaccagcggcgtgcacaccttcccggctgtcctacagtcctcagga

SEQ ID NO: 1639 - DNA, 457 bp, Human
gaggtgcagctggtggagtctgggggaggcttggtccagcctggggggtccctgagactctcctgtgcagcctctggattcaccttaagtagctattggatgagctgggtccgccaggctccagggaaggggctggagtgggtggccaacataaagcaagatggaagtgagaaatactatgtggactctgtgaagggccgattcaccatctccagagacaacgccaagaactcactgtatctgcaaatgaacagcctgagagccgaggacacggccgtgtattactgtgcgagagatctaactgccacctggttcgacccctggggccagggaaccctggtcaccgtctcctcagcacccaccaaggctccggatgtgttccccatcatatcagggtgcagacacccaaaggataacagccctgtggtcctggcatgcttgataactgggtaccacc

SEQ ID NO: 1640 - DNA, 558 bp, Human
caggtccagcttgtgcagtctggggctgaggtgaagaagcctggggcctcagtgaaggtttcctgcaaggcttctggatacaccttcactagctatgctttgcattgggtgcgccaggcccccggacaaaggcttgagtggatgggatggatcaacgctggcaatggtaacacaaaatattcacagaggttccagggcagagtcaccattattagggacacatccgcgagcacaacctacatggagctgagcagcctgagatctgaagacacggctgtgtattactgtgcgagaggctatgcccgagccggggttattactatcaaagaatcactccaccactggggccagggcaccctggtcaccgtctcctcagcctccaccaagggcccatcggtcttccccctggcaccctcctccaagagcacctctgggggcacagcggccctgggctgcctggtcaaggactacttccccgaaccggtgacggtgtcgtggaactcaggcgccctgaccagcggcgtgcacaccttcccggctgtcctacagtcctcagga

SEQ ID NO: 1641 - DNA, 549 bp, Human
caggtgcagctgcaggagtcgggcccaggactggtgaagccttcggagaccctgtccctcacctgcactgtctctggtggctccatcagtagttcctactggagctggatccggcagcccccagggaagggactggagtggattgggtatatctattacagtgggaacaccaactacaacccctccctcaagagtcgagtcaccctatcaatagacacgtccaagaaccagttctccctgaagctgagctctgtgaccgctgcggacacggccgtgtattactgtgcgtgcagtgttacgatttttggagtggttacccctgcttttgatatctggggccaagggacaatggtcaccgtctcttcagcctccaccaagggcccatcggtcttccccctggcaccctcctccaagagcacctctgggggcacagcggccctgggctgcctggtcaaggactacttccccgaaccggtgacggtgtcgtggaactcaggcgccctgaccagcggcgtgcacaccttcccggctgtcctacagtcctcagga

SEQ ID NO: 1642 - DNA, 596 bp, Human
caggtccagctggtgcagtctggggctgaggtgaagaagcctgggtcctcggtgaaggtctcctgcaaggcttctggaggcaccttcagcagctatgctatcagctgggtgcgacaggcccctggacaagggcttgagtggatgggaaggatcatccctatccttggtatagcaaactacgcacagaagttccagggcagagtcacgattaccgcggacaaatccacgagcacagcctacatggagctgagcagcctgagatctgaggacacggccgtgtattactgtgcgagatgggattttggagtggttattcaatacggtatggacgtctggggccaagggaccacggtcaccgtctcctcagcctccaccaagggcccatcggtcttccccctggcaccctcctccaagagcacctctgggggcacagcggccctgggctgcctggtcaaggactacttccccgaaccggtgacggtgtcgtggaactcaggcgccctgaccagcggcgtgcacaccttcccggctgtcctacagtcctcaggactctactccctcagcagcgtggtgaccgtgccctccagcagcttggg

SEQ ID NO: 1643 - DNA, 549 bp, Human
caggtgcagctgcaggagtcgggcccaggactggtgaagccttcggagaccctgtccctcacctgcactgtctctggtggctccatcaatagtttctactggaactggatccggcagccccccgggaagggactggagtggattgggtatatctattacagtgggaacaccaagtacaacccctccctcaagagtcgagtcaccatatcagtagacacgtccaacagccagttctccctgaagctgagctctgtgaccgctgcggacacggccgtgtattactgtgcggcgctcaaaaagcaggagctggtatcgttgcaggcttttgatatctggggccaagggacaatggtcaccgtctcttcagcctccaccaagggcccatcggtcttccccctggcaccctcctccaagagcacctctgggggcacagcggccctgggctgcctggtcaaggactacttccccgaaccggtgacggtgtcgtggaactcaggcgccctgaccagcggcgtgcacaccttcccggctgtcctacagtcctcagga

SEQ ID NO: 1644 - DNA, 549 bp, Human
caggtgcagctgcaggagtcgggcccaggactggtgaagccttcggagaccctgtccctcacctgcactgtctctggtggctccatcagtagttactactggagctggatccggcagcccccagggaagggactggagtggattggatatatctattacagtgggagcaccaagtacaacccctccctcaagagtcgagtcaccatatcagtagacacgtccaagaaccagttctccctgaagctgacctctgtgaccgctgcggacacggccgtgtattactgtgcgagaatctatgatagtagtggttattaccatcccgtctttgactactggggccagggaaccctggtcaccgtctcctcagcctccaccaagggcccatcggtcttccccctggcaccctcctccaagagcacctctgggggcacagcggccctgggctgcctggtcaaggactacttccccgaaccggtgacggtgtcgtggaactcaggcgccctgaccagcggcgtgcacaccttcccggctgtcctacagtcctcagga

SEQ ID NO: 1645 - DNA, 564 bp, Human
caggtgcagctggtgcagtctggggctgaggtgaagaagcctggggcctcagtgagggtttcctgcaaggcatctggatacaccttcaccagctactatatctactgggtgcgacaggcccctggacaagggcttgagtggatgggagtaatcaaccctagtggtggtagcacaagctacgcacagaagttccagggcagagtcaccttgaccagggacacgtccacgagcacagtctacatggacctgagcagtctgagatctgaggacacggccgtgtattactgtgcgagagatcctataatgtgggaggtagtaactcgggggaggggcaactggttcgacccctggggccagggaaccctggtcaccgtctcctcagcctccaccaagggcccatcggtcttccccctggcaccctcctccaagagcacctctgggggcacagcggccctgggctgcctggtcaaggactacttccccgaaccggtgacggtgtcgtggaactcaggcgccctgaccagcggcgtgcacaccttcccggctgtcctacagtcctcagga

SEQ ID NO: 1646 - DNA, 456 bp, Human
gaggtgcagctggtggagtctgggggaggcttggtccagcctggggggtccctgagactctcctgtgcagcctctggattcaccgtcagtagcaactacatgagctgggtccgccaggctccagggaaggggctggagtgggtctcagttatttatagcgatggtaacacatactatgcagactccgtgaagggcagattcaccatctccagagacaattccaagaacatgttatatcttcaaatgaacagcctgagagccgaggacacggctgtgtattactgtgcgagagaccccggccaggggtattgtagtggtggtagctgcgctccgtcctattctcttgactactggggccagggaaccctggtcactgtctcctcagggagtgcatccgccccaacccttttccccctcgtctcctgtgagaattccccgtcggatacgagcagcgtg

SEQ ID NO: 1647 - DNA, 552 bp, Human
gaggtgcagctggtggagtctggaggaggcttggtccagcctggggggtccctgagactctcctgtgcagcctctgggttcaccgtcagtagcaactacatgagctgggtccgccaggctccagggaaggggctggagtgggtctcagatatttatagcggtggtagcacatactacgcagactccgtgaagggccgattcaccatctccagacacaattccaagaacacgctgtatcttcaaatgaacagcctgagagctgaggacacggccgtgtattactgtgcgagagatcgacggggatacagctatggtttgcaccacggtatggacgtctggggccaagggaccacggtcaccgtctcctcagcctccaccaagggcccatcggtcttccccctggcaccctcctccaagagcacctctgggggcacagcggccctgggctgcctggtcaaggactacttccccgaaccggtgacggtgtcgtggaactcaggcgccctgaccagcggcgtgcacaccttcccggctgtcctacagtcctcagga

SEQ ID NO: 1648 - DNA, 484 bp, Human
cagctgcagctgcaggagtcgggcccaggactggtgaagccttcggagaccctgtccctcacctgcactgtctctggtggctccatcagcagtagtagttactactggggctggatccgccagcccccagggaaggggctggagtggattgggagtatctattatagtgggagcacctactacaacccgtccctcaagagtcgagtcaccatatccgtagacacgtccaagaaccagttctccctgaagctgagctctgtgaccgccgcagacacggctgtgtattactgtgcgagacgaatcagacgccccacctcggaagtggttattacttatgtctttgactactggggccagggaaccctggtcaccgtctcctcagcacccaccaaggctccggatgtgttccccatcatatcagggtgcagacacccaaaggataacagccctgtggtcctggcatgcttgataactgggtaccacc

SEQ ID NO: 1649 - DNA, 444 bp, Human
gaggtgcagctggtggagtctggaggaggcttggtccagcctggggggtccctgagactctcctgtgcagcctctgggttcaccgtcagtagcaactacatgagctgggtccgccaggctccagggaaggggctggagtgggtctcagttatttatagcggtggtagcacatactacgcagactccgtgaagggccgattcaccatctccagacacaattccaagaacacgctgtatcttcaaatgaacagcctgagagctgaggacacggccgtgtattactgtgcgagagaaggatattgtactaatggtgtatgctataggcatgcttttgatatctggggccaagggacaatggtcaccgtctcttcagggagtgcatccgccccaacccttttccccctcgtctcctgtgagaattccccgtcggatacgagcagcgtg

SEQ ID NO: 1650 - DNA, 534 bp, Human
caggtgcagctgcaggagtcgggcccaggactggtgaagccttcggagaccctgtccctcacctgcactgtctctggtggctccatcagtagttactactggagctggatccggcagcccccagggaagggactggagtggattgggtatatctattacagtgggagcaccaactacaacccctccctcaagagtcgagtcaccatatcagtagacacgtccaagaaccagttctccctgaagctgagctctgtgaccgctgcggacacggccgtgtattactgtgcgagagattactatcaactccctatggacgtctggggccaagggaccacggtcaccgtctcctcagcctccaccaagggcccatcggtcttccccctggcaccctcctccaagagcacctctgggggcacagcggccctgggctgcctggtcaaggactacttccccgaaccggtgacggtgtcgtggaactcaggcgccctgaccagcggcgtgcacaccttcccggctgtcctacagtcctcagga

SEQ ID NO: 1651 - DNA, 555 bp, Human
gaggtgcagctggtggagtctgggggaggcttggtacagcctggggggtccctgagactctcctgtgcagtctctggattcaccttcagtagctatagcatgaactgggtccgccaggctccagggaaggggctggagtgggtttcatacattagtagtagtagtagtatcatatactacgcagactctgtgaagggccgattcaccatctccagagacaacgccaagaactcactgtatctgcaaatgaacagcctgagagccgaggacacggctgtgtattactgtgcgagagatttcctcgactatagcaggtcgtattcgtacggtatggacgtctggggccaagggaccacggtcaccgtctcctcagcctccaccaagggcccatcggtcttccccctggcaccctcctccaagagcacctctgggggcacagcggccctgggctgcctggtcaaggactacttccccgaaccggtgacggtgtcgtggaactcaggcgccctgaccagcggcgtgcacaccttcccggctgtcctacagtcctcagga

SEQ ID NO: 1652 - DNA, 390 bp, Human
gaggtgcagctggtggagtctgggggaggcttggtacagccagggcggtccctgagactctcctgtacagcttctggattcacctttggtgattatgctatgagctggttccgccaggctccagggaaggggctggagtgggtaggtttcattagaagcaaagcttatggtgggacaacacaatacgccgcctctgtgaaaggcagattcaccatctcaagagatgattccaaaagcatcgcctatctgcaaatgaacagcctgaaaaccgaggacacagccgtgtattactgtactagagtacgatattgtactaatggtgtatgctatggctaccactttgactactggggccagggaaccgtggtcaccgtctcctcagcctccacc

SEQ ID NO: 1653 - DNA, 549 bp, Human
caggtgcagctgcaggagtcgggcccaggactggtgaagccttcggagaccctgtccctcacctgcactgtctctggtggctccatcagtagttactactggagctggatccgtcagcccccagggaaggggctggagtggattggctatgtctattacagtgggaacaccaaatacaacccctccctcaagagtcgagtcaccatatcagtagacacgtccaagaaccagttctccctgaagctgggctctgtgaccgccgcggacacggccgtttattattgtgcgagacattcgaggatagaagtggctggtactctagactttgactactggggccagggaaccctggtcaccgtctcctcagcctccaccaagggcccatcggtcttccccctggcaccctcctccaagagcacctctgggggcacagcggccctgggctgcctggtcaaggactacttccccgaaccggtgacggtgtcgtggaactcaggcgccctgaccagcggcgtgcacaccttcccggctgtcctacagtcctcagga

SEQ ID NO: 1654 - DNA, 576 bp, Human
caggtgcagctggtggagtctgggggaggcgtggtccagcctgggaggtccctgagactctcctgtgcagcctctggattcaccttcagtaactatggcatgcactgggtccgccaggctccaggcaaggggctggagtgggtggccgttatatggtatgatggaagtaataaatactatgcagactccgtgaagggccgattcaccatctccagagacaattccaagaacacgctgtatctgcaaatgaacagcctgagagccgaggacacggctgtgtattactgtgcgagaggagattgtactaatggtgtatgccatccccttctaatttattatgatagtagtggtttagactactggggccagggaaccctggtcaccgtctcctcagcctccaccaagggcccatcggtcttccccctggcaccctcctccaagagcacctctgggggcacagcggccctgggctgcctggtcaaggactacttccccgaaccggtgacggtgtcgtggaactcaggcgccctgaccagcggcgtgcacaccttcccggctgtcctacagtcctcagga

SEQ ID NO: 1655 - DNA, 468 bp, Human
caggtgcagctggtggagtctgggggaggcgtggtccagcctgggaggtccctgagactctcctgtgcagcctctggattcaccttcactagctatgctatgcactgggtccgccaggctccaggcaaggggctggagtgggtggcagttatatcatatgatggaggcagtaaatactacgcagactccgtgaagggccgattcaccatctccagagacaattccaagaacacgctgtatctgcaaatgaacagcctgagagctgaggacacggctgtgtattactgtgcgaggactacaccgggtataacagcagctggaacagggaccctagggagatactactactacggtatggacgtctggggccaagggaccacggtcaccgtctcctcagggagtgcatccgccccaacccttttccccctcgtctcctgtgagaattccccgtcggatacgagcagcgtg

SEQ ID NO: 1656 - DNA, 558 bp, Human
caggtccaactggtacagtctggggctgaggtgaagaagcctggggcctcagtgaaggtctcctgcaaggtttccggatacaccctcattgaattatccatgcactgggtgcgacaggctcctggaaaagggcttgagtggatgggaggttttgatcctgaagatggtgaaacaatctacgcacagaagttccagggcagagtcaccatgaccgaggacacatctacagacacagcctacatggcgctgagcagcctgacatctgaggacacggccgtgtattactgtgcaacagcctacgcgtattactatgcttcggggggttattatacccttgactactggggccagggaaccctggtcaccgtctcctcagcctccaccaagggcccatcggtcttccccctggcaccctcctccaagagcacctctgggggcacagcggccctgggctgcctggtcaaggactacttccccgaaccggtgacggtgtcgtggaactcaggcgccctgaccagcggcgtgcacaccttcccggctgtcctacagtcctcagga

SEQ ID NO: 1657 - DNA, 429 bp, Human
cagatcaccttgaaggagtctggtcctacgctggtgaaacccacacagaccctcacgctgacctgcaccttctctgggttctcactcaacactagtggagtgggtgtgggctggatccgtcagcccccaggaaaggccctggagtggcttgcactcatttattgggatgatgataagcgctacagcccatctctgaagagcaggctcaccatcaccaaggacacctccaaaaaccaggtggtccttacaatgaccaacatggaccctgtggacacagccacatattactgtgcacaccatacgattgttccaatttttgactactggggccagggaaccctggtcaccgtctcctcagggagtgcatccgccccaacccttttccccctcgtctcctgtgagaattccccgtcggatacgagcagcgtg

SEQ ID NO: 1658 - DNA, 558 bp, Human
caggtgcagctgcaggagtcgggcccaggactggtgaagccttcggagaccctgtccctcacgtgcactgtctctggtggctccatcagtagttactactggagctggatccggcagccccccgggaagggactggagtggattgggaatatctataacagtgggagcaccaactacaacccctccctcaagagtcgactcaccatatcagttgacacgtccaagaaccacttctccctgaagctgagctctgtgaccgctgcggacacggccgtgtattactgtgcgagaggaggactagagcacgacggtgactacgtctactactacggtatggacgtctggggccaagggaccacgatcaccgtctcctcagcctccaccaagggcccatcggtcttccccctggcaccctcctccaagagcacctctgggggcacagcggccctgggctgcctggtcaaggactacttccccgaaccggtgacggtgtcgtggaactcaggcgccctgaccagcggcgtgcacaccttcccggctgtcctacagtcctcagga

SEQ ID NO: 1659 - DNA, 475 bp, Human
caggtgcagctggtggagtctgggggaggcgtggtccagcctgggaggtccctgagactctcctgtgcagcctctggattcaccttcagtagctatggcatgcactgggtccgccaggctccaggcaaggggctggagtgggtggcagttatatcatatgatggaagtaataaatactatgcagactccgtgaagggccgattcaccatctccagagacaattccaagaacacgctgtatctgcaaatgaacagcctgagagctgaggacacggctgtgtattactgtgcgaaatatacgtcaacggtaactacgaactactactacggtatggacgtctggggccaagggaccacggtcaccgtctcctcagcacccaccaaggctccggatgtgttccccatcatatcagggtgcagacacccaaaggataacagccctgtggtcctggcatgcttgataactgggtaccacc

SEQ ID NO: 1660 - DNA, 441 bp, Human
caggtgcagctggtggagtctgggggaggcgtggtccagcctgggaggtccctgagactctcctgtgcagcgtctggattcaccttcagtagctatggcatgcactgggtccgccaggctccaggcaaggggctggagtgggtggcagttatatggtatgatggaagtaataaatactatgcagactccgtgaagggccgattcaccatctccagagacaattccaagaacacgctgtatctgcaaatgaacagcctgagagccgaggacacggctgtgtattactgtgcgagaggacgttccccaggtgggggccactactacggtatggacgtctggggccaagggaccacggtcaccgtctcctcagggagtgcatccgccccaacccttttccccctcgtctcctgtgagaattccccgtcggatacgagcagcgtg

SEQ ID NO: 1661 - DNA, 444 bp, Human
caggtcaccttgagggagtctggtcctgcgctggtgaaacccacacagaccctcacactgacctgcaccttctctgggctctcactcagcagtagtggaatgtgtgtgagctggatccgtcagcccccagggaaggccctggagtggcttgcacgcattgattgggatgatgataaatactacagcacatctctgaagaccaggctcaccatctccaaggacacctccaaaaatcaggtggtccttacaatgaccaacatggaccctgtggacacagccacgtattactgtgcacggatatgtactatggttcggggactccatgatgcttttgatatctggggccaagggacaatggtcaccgtctcttcagggagtgcatccgccccaacccttttccccctcgtctcctgtgagaattccccgtcggatacgagcagcgtg

SEQ ID NO: 1662 - DNA, 555 bp, Human
gaggtgcagctggtgcagtctggagcagaggtgaaaaagcccggggagtctctgaagatctcctgtaagggttctggatacagctttaccacctactggatcgcctgggtgcgccagatgcccgggaaaggcctggagtgggtggggatcatctatcctgatgactctgataccagatacagcccgtccttccaaggccaggtcaccatctcagccgacaagtccatcggtaccgcctacctgcagtggagtagcctgaaggcctcggacaccgccatgtattactgtgcgaggggccagtattacgatttttggagcggagccggaggtgtggacgtctggggccaagggaccacggtcaccgtctcctcagcctccaccaagggcccatcggtcttccccctggcaccctcctccaagagcacctctgggggcacagcggccctgggctgcctggtcaaggactacttccccgaaccggtgacggtgtcgtggaactcaggcgccctgaccagcggcgtgcacaccttcccggctgtcctacagtcctcagga

SEQ ID NO: 1663 - DNA, 537 bp, Human
gaggtgcagctggtgcagtctggagcagaggtgaaaaagcccggggagtctctgaagatctcctgtaagggttctggatacagctttaccagctactggatcggctgggtgcgccagatgcccgggaaaggcctggagtggatggggatcatctatcctggtgactctgataccagatacagcccgtccttccaaggccaggtcaccatctcagccgacaagtccatcactaccgcctacctgcagtggagcagcctgaaggcctcggacaccgccatgtattactgtgcgaggacccagactacgaactggttcgactcctggggccagggaaccctggtcaccgtctcctcagcctccaccaagggcccatcggtcttccccctggcaccctcctccaagagcacctctgggggcacagcggccctgggctgcctggtcaaggactacttccccgaaccggtgacggtgtcgtggaactcaggcgccctgaccagcggcgtgcacaccttcccggctgtcctacagtcctcagga

SEQ ID NO: 1664 - DNA, 567 bp, Human
caggtgcagctggtggagtctgggggaggcgtggtccagcctggggggtccctgagactctcctgtgcagcgtctggattcaccttcagtagctatggcatgcactgggtccgccaggctccaggcaaggggctggagtgggtgacatttacacggtatgatggaagtaataagttctatgcagactccgtgaagggccgattctccatctccagagacaattccaagaacacgttgtatctgcaaatgaatagtctgagagctgaggacacggctgtatactactgcgcgaaagaaagtcgtgtggcgtttgggggagctatcgccatctactacttcggtatggacgtctggggccaagggaccacggtcaccgtctcctcagcctccaccaagggcccatcggtcttccccctggcgccctgctccaggagcacctctgggggcacagcggccctgggctgcctggtcaaggactacttccccgaaccggtgacggtgtcgtggaactcaggcgccctgaccagcggcgtgcacaccttcccggctgtcctacagtcctcagga

SEQ ID NO: 1665 - DNA, 552 bp, Human
gaggtgcagttattggagtctgggggaggcttggtacagcctggggggtccctgagactctcctgtgcagcctctggattcacctttagcaactatgccatgagctgggtccgccaggctccagggaaggggctggagtgggtctcagctattcgtaatagtggtagtagcacatactatgctgactccgtgaagggccggttcaccatctccagagacaattccaagaacacgctgtatctgcaaatgaacagcctgagagccgaggactcggccgtatattactgtgcgaaagtaggggggacagcagctggtcatccgttttatgactactggggccagggaaccctggtcaccgtctcctcagcctccaccaagggcccatcggtcttccccctggcaccctcctccaagagcacctctgggggcacagcggccctgggctgcctggtcaaggactacttccccgaaccggtgacggtgtcgtggaactcaggcgccctgaccagcggcgtgcacaccttcccggctgtcctacagtcctcaggactc

SEQ ID NO: 1666 - DNA, 543 bp, Human
caggtgcagctggtgcagtctggggctgaggtgaagaagcctggggcctcagtgaaggtctcctgcaaggcttctggatacaccttcaccggctactatatgcactgggtgcgacaggcccctggacaaggtcttgagtggatgggacggatcaaccctaacagtggtggcacaaactttgcacagaggtttcagggcagggtctccatgaccagggacacctccatcagcacagcctacatggaactgagcagcctgagatctgacgacacggccgtatattactgtgcgagaggcgcaaaattcgagcacctcccttttgatatctggggccaagggacaatggtcaccgtctcttcagcctccaccaagggcccatcggtcttccccctggcaccctcctccaagagcacctctgggggcacagcggccctgggctgcctggtcaaggactacttccccgaaccggtgacggtgtcgtggaactcaggcgccctgaccagcggcgtgcacaccttcccggctgtcctacagtcctcagga

SEQ ID NO: 1667 - DNA, 558 bp, Human
caggtgcaactggtgcagtctggggctgaggtgaagaagcctggggcctcagtgaaggtctcctgcaagtcttctggatacaccttcaccggctactatatgcactgggtgcgacaggcccctggacaagggcttgagtggatgggacggatcaaccctaatagtggtggcacaaactatgcacagaagtttcagggcagggtcaccatgaccagggacacgtccatcagcacagcctacatggaactgagcaggctgagatctgacgacacggccgtatattactgtgcgagaggggcccgaggtggcgcggggtgcagtggctggtcatgttttgacttctggggccagggaaccctggtcaccgtctcctcagcctccaccaagggcccatcggtcttccccctggcaccctcctccaagagcacctctgggggcacagcggccctgggctgcctggtcaaggactacttccccgaaccggtgacggtgtcgtggaactcaggcgccctgaccagcggcgtgcacaccttcccggctgtcctacagtcctcagga

SEQ ID NO: 1668 - DNA, 549 bp, Human
gaggtgcagctggtggagtctgggggaggcctggtcaagccgggggggtccctgagactctcctgtgcagcctctggattcaccttcagtgactataccatgaactgggtccgacaggctccagggaagggactggagtgggtctcatccattactagaagtagtacttacatctactacgcagactcagtgaagggccgattcaccatctccagagacaacgccaagaactcactgtatctgcaaatgaacagcctgagagccgaggacacggctgtctattactgtgcgagagacccctattacgatattttgactggttattggaactactggggccagggaaccctggtcaccgtctcctcagcctccaccaagggcccatcggtcttccccctggcaccctcctccaagagcacctctgggggcacagcggccctgggctgcctggtcaaggactacttccccgaaccggtgacggtgtcgtggaactcaggcgccctgaccagcggcgtgcacaccttcccggctgtcctacagtcctcagga

SEQ ID NO: 1669 - DNA, 549 bp, Human
gaggtgcagctggtggagtctgggggaggcttggtacagcctggggggtccctgagactctcctgtgcagcctctggattcacctttagcagctatgccatgagctgggtccgccaggctccagggaaggggctggagtgggtctcatctattagaggtagtggtggtagcacatactacgcagactccgtgaagggccggttcaccatctccagagacaactccaagtacacgttgtatctgcaaatgaacagcctgagagccgaggacacggccgtatattactgtgcgaaaataactggagccgtcgggggggagaactggttcgacccctggggccagggaaccctggtcaccgtctcctcagcctccaccaagggcccatcggtcttccccctggcgccctgctccaggagcacctctgggggcacagcggccctgggctgcctggtcaaggactacttccccgaaccggtgacggtgtcgtggaactcaggcgccctgaccagcggcgtgcacaccttcccggctgtcctacagtcctcagga

SEQ ID NO: 1670 - DNA, 533 bp, Human
gaggtgcgcctggtgcagtctgggggaggcttggtaaagcccggggggtccctgagactctcctgtgcagcctctggattcaccttcagcaccgcctgggtgaggtgggtccgccaggctccagggaaggggctggagtgcgttggccgaatcaaaagtaaaaatgacggtgacagagcagagtacgctgcacccgcgagaggcagattcatcatctcaagagatgatgcagaaaacattctgtatttacaaatgaacaacctgaaaaccgaggacacagccttttattactgtaccacggatcaaggaaatagtagtgccttctacagtgctgactattggggccagggaaccctggtcaccgtctcctcagcatccccgaccagccccaaggtcttcccgctgagcctcgacagcaccccccaagatgggaacgtggtcgtcgcatgcctggtccagggcttcttcccccaggagccactcagtgtgacctggagcgaaagcggacagaacgtgaccgccagaaacttccc

SEQ ID NO: 1671 - DNA, 537 bp, Human
gaggtgcagctggtgcagtctggagcagaggtgaaaaagcccggggagtctctgaagatctcctgtaagggttctggatacaggtttaccagatactggatcggctgggtgcgccagatgcccgggaaaggcctggagtggatggggatcatctatcttggtgactctgaaaccagatacagtccgtccttccaaggccaggtcaccatctcagccgacaactccatcagcaccgcctacctgcagtggagcagcctgaaggcctcggacaccgccatgtattactgtgcgagaagttccaattggaattacggtgactactggggccagggaaccctggtcaccgtctcctcagcttccaccaagggcccatcggtcttccccctggcgccctgctccaggagcacctctgggggcacagcggccctgggctgcctggtcaaggactacttccccgaaccggtgacggtgtcgtggaactcaggcgccctgaccagcggcgtgcacaccttcccggctgtcctacagtcctcagga

SEQ ID NO: 1672 - DNA, 555 bp, Human
caggtgcagctgcaggagtcgggcccaggactggtgaagccttcggagaccctgtccctcacctgcactgtctctggtggctccatcagtagtgactactggagctggatccggcagcccccagggaagggactggagtggattggatatatgtattacagtgggagcaccaactacaacccctccctcaagagtcgagtcaccatatcagtagacacgtccaagaaccagttctccctgaagctgagctctgtgaccgctgcggacacggccgtgtattactgtgcgagatgggataggggaagcaggcctcactactactactatggtatggacgtctggggccaagggaccacggtcaccgtctcctcagcctccaccaagggcccatcggtcttccccctggcaccctcctccaagagcacctctgggggcacagcggccctgggctgcctggtcaaggactacttccccgaaccggtgacggtgtcgtggaactcaggcgccctgaccagcggcgtgcacaccttcccggctgtcctacagtcctcagga

SEQ ID NO: 1673 - DNA, 643 bp, Human
gaggtgcagctggtgcagtctggagcagaggtgaaaaagcccggggagtctctgaagatctcctgtaagggttctgcatacacctttaccacctactggatcggctgggtgcgccagatgcccgggaaaggcctggagtggatggggatcatctatcctggtgactctgataccagatacagcccgtccttccaaggccaggtcaccatctcagccgacaagtccatcagcaccgcctacctgcagtggagcagcctgaaggcctcggacaccgccatgtattactgtgcgagattattattggtggctggtccctttgactactggggccagggaaccctggtcaccgtctcctcagcctccaccaagggcccatcggtcttccccctggcaccctcctccaagagcacctctgggggcacagcggccctgggctgcctggtcaaggactacttccccgaaccggtgacggtgtcgtggaactcaggcgccctgaccagcggcgtgcacaccttcccggctgtcctacagtcctcaggactctactccctcagcagcgtggtgaccgtgccctccagcagcttgggcacccagacctacatctgcaacgtgaatcacaagcccagcaacaccaaggtggaca

SEQ ID NO: 1674 - DNA, 552 bp, Human
caggtgcagctgctgcagtctggggctgaagtgaagaagcctggggcctcagtgaaggtctcctgcaaggcttctggatacaccttcaccggctactatatgcactgggtgcgacaggcccctggacaagggcttgagtggatgggacggatcaaccctaacagtggtggcacaaattatgcacagaagtttcagggcagggtcaccatgaccagggacacgtccatcagcacagcctacatggagctgagcaggctgacatctgacgacacggccgtgtattactgtgcgaccaaaactggaattgatcgctactactactactacatggacgtctggggcaaagggaccacggtcaccgtctcctcagcctccaccaagggcccatcggtcttccccctggcaccctcctccaagagcacctctgggggcacagcggccctgggctgcctggtcaaggactacttccccgaaccggtgacggtgtcgtggaactcaggcgccctgaccagcggcgtgcacaccttcccggctgtcctacagtcctcagga

SEQ ID NO: 1675 - DNA, 515 bp, Human
caggtgcagctgcaggagtcgggcccaggactggtgaagccttcggagaccctgtccctcacctgcagtgtctctggtggctccatcagtgattactactggagctggatccggcagccccctgggaagggactggagtggattggatatatctataacagtgggagtaccaactacaacccctccctcaagagtcgagtcaccatatcagcagacccgtccaagaaccagttctccctgaagttgagctctgtgaccgccgcagacacggccgtatattactgtgcgagacctcacggcggtgactacgcttttgatatttggggccaagggacaatggtcaccgtctcttcagcatccccgaccagccccaaggtcttcccgctgagcctcgacagcaccccccaagatgggaacgtggtcgtcgcatgcctggtccagggcttcttcccccaggagccactcagtgtgacctggagcgaaagcggacagaacgtgaccgccagaaacttccc

SEQ ID NO: 1676 - DNA, 552 bp, Human
caggtccagctggtgcaatctggggctgaggtgatgaagcctgggtcctcggtgaaggtctcctgcaaggcttctggaggcaccttcagcagctatagtatcacctgggtgcgacaggcccctggacaagggcttgagtggatgggaaggatcatccctatccttggtatagcaaactacgcacagaagttccagggcagagtcacgattaccgcggacaaatccacgagcacagcctacatggagctgagcagcctgagatctgaggacacggccgtgtattactgtgcgagagggtatagtgggagcccctcgaatttagacggtatggacgtctggggccaagggaccacggtcaccgtctcctcagcctccaccaagggcccatcggtcttccccctggcaccctcctccaagagcacctctgggggcacagcggccctgggctgcctggtcaaggactacttccccgaaccggtgacggtgtcgtggaactcaggcgccctgaccagcggcgtgcacaccttcccggctgtcctacagtcctcagga

SEQ ID NO: 1677 - DNA, 570 bp, Human
cagctgcagctgcaggagtcgggcccaggactggtgaagccttcggagaccctgtccctcacctgcactgtctctggtggctccatcagcagtagtagttactactggggctggatccgccagcccccagggaaggggctggagtggattgggagtatctattatagtgggagcacctactacaacccgtccctcaagagtcgattcaccatatccgtagacacgtccaagaaccagttctccctgaagctgagctctgtgaccgccgcagacacggctgtgtattactgtgcggcctatcagaggaaactaggatattgtcgtggtaatagctgcttttcctgcttcgacccctggggccagggaaccctggtcaccgtctcctcagcctccaccaagggcccatcggtcttccccctggcaccctcctccaagagcacctctgggggcacagcggccctgggctgcctggtcaaggactacttccccgaaccggtgacggtgtcgtggaactcaggcgccctgaccagcggcgtgcacaccttcccggctgtcctacagtcctcagga

SEQ ID NO: 1678 - DNA, 549 bp, Human
gaggtgcacctggtgcagtctggagcagaggtgaaacagcccggggagtctctgaagatctcctgtaagggttctggatacaactttgccacctactggatcgcctgggtgcgccagatgcccgggaaaggcctggagtggatggggatcatctatcctggtgactctgataccagatacagcccgtccttccaaggccaggtcatcatctcagccgacaagtccatcggcaccgccttcctgcagtggagcagcctgaaggcctcggacaccgccatgtattactgtgcgaggcgggggtatagtagctctaactatcgcgttgacgaatactattactacggtatggacgtctggggccaagggaccacggtcaccgtctcctcagcatccccgaccagccccaaggtcttcccgctgagcctctgcagcacccagccagatgggaacgtggtcatcgcctgcctggtccagggcttcttcccccaggagccactcagtgtgacctggagcgaaagcggacagggcgtgaccgccagaaacttcccc

SEQ ID NO: 1679 - DNA, 552 bp, Human
caggtgcagctggtgcagtctggggctgaggtgaagaagcctggggcctcagtgaaggtctcctgcaaggcttctggatacaccttcaccggctactatatgcactgggtgcgacaggcccctggacaagggcttgagtggatgggacggatcaaccctaacagtggtgacacaaactatgcacagaagtttcagggcagggtcaccatgaccagggacacgtccatcagcacagcctacatggagctgagcaggctgagatctgacgacacggccgtgtattactgtgcgagattgggtaaaggaatggcagcagcccgtactgtctttgactcctggggccagggaaccctggtcaccgtctcctcagcctccaccaagggcccatcggtcttccccctggcaccctcctccaagagcacctctgggggcacagcggccctgggctgcctggtcaaggactacttccccgaaccggtgacggtgtcgtggaactcaggcgccctgaccagcggcgtgcacaccttcccggctgtcctacagtcctcagga

SEQ ID NO: 1680 - DNA, 549 bp, Human
caggtgcacctggtgcagtctggggctgaggtgaagaagcctggggcctcagtgaaggtctcctgcaaggcttctggatacaccttcaccggctactatatgaactgggtgcgacaggcccctggacaagggcttgagtggatgggacggatcaaccctaacagtggtggcacaaactatgcacagaagtttcagggcagggtcaccatgaccagggacacgtccatcagcacagcctacatggaactgagcaggctgagatctgacgacgcggccgtgtattactgtgcgagagctgagaggtatagcagcagctggtacaatctttactactggggccagggaaccctggtcaccgtctcctcagcctccaccaagggcccatcggtcttccccctggcaccctcctccaagagcacctctgggggcacagcggccctgggctgcctggtcaaggactacttccccgaaccggtgacggtgtcgtggaactcaggcgccctgaccagcggcgtgcacaccttcccggctgtcctacagtcctcagga

SEQ ID NO: 1681 - DNA, 641 bp, Human
gaggtgcagctggtgcagtctggagcagaggtgaaaaagcccggggagtctctgaagatctcctgtaagggttctagatacagctttaccagatactggatcgcctgggtgcgccagatgcccgggaaaggcctggagtggatggggatcatctatcctggtgactctgataccagatacagcccgtccttccaaggcccggtcaccatctcagccgacaagtccatcagcaccgcctacctgcagtggagcagcctgaaggcctcggacaccgccatatattactgtgcgagactcccgaacagtaactacgttgactactggggccagggaaccctggtcaccgtctcctcagcctccaccaagggcccatcggtcttccccctggcaccctcctccaagagcacctctgggggcacagcggccctgggctgcctggtcaaggactacttccccgaaccggtgacggtgtcgtggaactcaggcgccctgaccagcggcgtgcacaccttcccggctgtcctacagtcctcaggactctactccctcagcagcgtggtgaccgtgccctccagcagcttgggcacccagacctacatctgcaacgtgaatcacaagcccagcaacaccaaggtggacaa

SEQ ID NO: 1682 - DNA, 662 bp, Human
caggtgcagctggtggagtctgggggaggcgtggtccagcctggggggtccgtaagactctcctgtgcagcgtctggattcgacttcactaataatggcatgtattgggtccgccaggctccaggcaaggggctggagtgggtggcatttatacggtatgatggaaataaacaagactatgcagactccgtgaagggccgattcaccatctccagagacaattccaaaaacactctgtatctgcaaatgagcagccttagacctgaggacacggctgtatattactgtgcgaaaggtgtttatactgaaaattacggctggggccagggaaccctggtcaccgtctcctcagggaccacggtcaccgtctcctcagcctccaccaagggcccatcggtcttccccctggcgccctgctccaggagcacctccgagagcacagcggccctgggctgcctggtcaaggactacttccccgaaccggtgacggtgtcgtggaactcaggcgctctgaccagcggcgtgcacaccttcccagctgtcctacagtcctcaggactctactccctcagcagcgtggtgaccgtgccctccagcaacttcggcacccagacctacacctgcaacgtagatcacaagcccagcaacaccaaggtggacaa

SEQ ID NO: 1683 - DNA, 631 bp, Human
caggtgcagctggtggagtctgggggaggcgtggtccagcctgggaggtccctgagactctcctgtgcagcctctggattcaccttcagtacctatggcatgcactgggtccgccaggctccaggcaaggggctggagtgggtggcagttatatcatatgatggaagtaataaatattatgcagactccgtgaagggccgattcaccatctccagagacaattccaagaacacgctgtatctgcaaatgaacagcctgagagctgaggacacggctgtgtattactgtgcgaaacagcaaggcacctattgcagtggtggtaactgctactcgggatattttgactactggggccagggaaccctggtcaccgtctcctcagcctccaccaagggcccatcggtcttccccctggcaccctcctccaagagcacctctgggggcacagcggccctgggctgcctggtcaaggactacttccccgaaccggtgacggtgtcgtggaactcaggcgccctgaccagcggcgtgcacaccttcccggctgtcctacagtcctcaggactctactccctcagcagcgtggtgaccgtgccctccagcagcttgggcacccagacctacatctgca

SEQ ID NO: 1684 - DNA, 603 bp, Human
caggttcagctggtgcagtctggagctgaggtgaagaagcctggggcctcagtgaaggtctcctgcacggcttctggttacaccgttaccagttatggtatcagctgggtgcgacaggcccctggacaagggcttgagtggatgggatggatcagcacttacaatggtaacacaaactatgcacagaagctccagggcagagtcaccatgaccacagacacatccacgagcacagcctacatggagctgaggagcctgagatctgacgacacggccgtgtattactgtgcgagagaatacagctatggttaccgactggcctactttgactactggggccagggaaccctggtcaccgtctcctcagggagtgcatccgccccaacccttttccccctcgtctcctgtgagaattccccgtcggatacgagcagcgtggccgttggctgcctcgcacaggacttccttcccgactccatcactttctcctggaaatacaagaacaactctgacatcagcagcacccggggcttcccatcagtcctgagagggggcaagtacgcagccacctcacaggtgctgctgccttccaaggacgtcatg

SEQ ID NO: 1685 - DNA, 549 bp, Human
gaggtgcagctggtggagtctgggggaggcttggtccagcctggggggtccctgagaatctcttgttcagcctctggattcaccttcagtagatatgctatgcactgggtccgccaggctccagggaagggactggaatatgtttcagctattaggagtaatgggggtagcacatactacgcagactccgtgaggggcagattcaccatctccagagacaattccaggaacacgctgtatcttcaaatgagcagtctgagagctgaggacacggctgtgtattactgtgtgataataaacaatttagcagcagctggtacccgttttgactactggggccagggaaccctggtcaccgtctcctcagcctccaccaagggcccatcggtcttccccctggcaccctcctccaagagcacctctgggggcacagcggccctgggctgcctggtcaaggactacttccccgaaccggtgacggtgtcgtggaactcaggcgccctgaccagcggcgtgcacaccttcccggctgtcctacagtcctcagga

SEQ ID NO: 1686 - DNA, 639 bp, Human
caggtgcagctacagcagtggggcgcagggctgttgaagccttcggagaccctgtccctcacctgcgctgtctatggtgggtccttcagtggttacttctggagctggatccgccagcccccagggaaggggctggagtggattggggaaatcaatcatagtggaagcaccaactacaacccgtccctcaagagtcgagtcaccatatcagtagacacgtccaagaaccagttctccctgaagctgagctctgtgaccgccgcggacacggctgtgtattactgtgcgagagcgccctattacgatttcttgcgggaaggaaactggttcgacccctggggccagggaaccctggtcaccgtctcctcagcctccaccaagggcccatcggtcttccccctggcaccctcctccaagagcacctctgggggcacagcggccctgggctgcctggtcaaggactacttccccgaaccggtgacggtgtcgtggaactcaggcgccctgaccagcggcgtgcacaccttcccggctgtcctacagtcctcaggactctactccctcagcagcgtggtgaccgtgccctccagcagcttgggcacccagacctacatctgcaacgtgaatcacaagcccagc

SEQ ID NO: 1687 - DNA, 561 bp, Human
caggtccagctggtgcaatctggggctgaggtgaagaagcctgggtcctcggtgaaggtctcctgcaaggcttctggagacaccttcggcagctatagtatcacctgggtgcgacaggcccctggacaaggacttgagtggatgggaaggatcatccctgtccttggtatagcaaactacgcacagaagttccagggcagagtcacgattaccgcggacaaatccacgagcacagcctacatggagctgagcagcctgagatctgaggacacggccgtgtattactgtgcgggagggggttgtagtggtggtaactgctactcgtggtacaactggttcgacccctggggccagggatccctggtcaccgtctcctcagcctccaccaagggcccatcggtcttccccctggcaccctcctccaagagcacctctgggggcacagcggccctgggctgcctggtcaaggactacttccccgaaccggtgacggtgtcgtggaactcaggcgccctgaccagcggcgtgcacaccttcccggctgtcctacagtcctcagga

SEQ ID NO: 1688 - DNA, 642 bp, Human
caggtgcagctgcaggagtcgggcccaggactggtgaagccttcggagaccctgtccctcacctgcactgtctctggtggctccatcagtagttactactggagctggatccggcagcccccagggaagggactggagtggattgggtatatcaattacagggggatcaccaactacaacccctccctcaagagtcgagtcaccatatcagtagacatgtccaagaaccagttctccctgaagctgagctctgtgaccgccgcagacacggccgtgtattcctgtgcgagactagcagtggctagtcgagggaccgttgactactggggccagggaaccctggtcaccgtctcctcagcctccaccaagggcccatcggtcttccccctggcaccctcctccaagagcacctctgggggcacagcggccctgggctgcctggtcaaggactacttccccgaaccggtgacggtgtcgtggaactcaggcgctctgaccagcggcgtgcacaccttcccagctgtcctacagtcctcaggactctactccctcagcagcgtggtgaccgtgccctccagcaacttcggcacccagacctacacctgcaacgtagatcacaagcccagcaacaccaaggtggac

SEQ ID NO: 1689 - DNA, 558 bp, Human
caggtgcagctggtgcagtctgggactgaggtgaagaagcctggggcctcagtgaaggtctcctgcaaggcttctggatacaccttcaccgactactatatgcactgggtgcgacaggcccctggacaagggcttgagtggatgggacggatcaaccctaccagtggtggcacaaactatccacagaagtttcagggcagtgtcaccatgaccagggacacgtccctcagcacagtctacatggaactgagcgggctgagatctgacgacacggccgtctattattgtgcgagagagagggttactctgattcagggaaagaaccactactacatggacgtctggggcacagggaccacggtcaccgtctcctcagcctccaccaagggcccatcggtcttccccctggcaccctcctccaagagcacctctgggggcacagcggccctgggctgcctggtcaaggactacttccccgaaccggtgacggtgtcgtggaactcaggcgccctgaccagcggcgtgcacaccttcccggctgtcctacagtcctcagga

SEQ ID NO: 1690 - DNA, 602 bp, Human
caggtccagcttgtgcagtctggggctgaggtgaagaagcctggggcctcagtgaaggtttcctgcaaggcttctggatataccttcactacctatgctatgcattgggtgcgccaggcccccggacaaaggcttgagtggatgggatggatcaacgctggcaatggtaacacaaaatattcacagaacttccagggcagagtcaccattaccagggacacatccgcgagcacagcctacatggagctgagcagcctgagatctgaagacacggctgtgtattactgtgcgagtctcgtgggtggggatagcagcagctggtatgactacatggacgtctggggcaaagggaccacggtcaccgtctcctcagcctccaccaagggcccatcggtcttccccctggcgccctgctccaggagcacctccgagagcacagcggccctgggctgcctggtcaaggactacttccccgaaccggtgacggtgtcgtggaactcaggcgctctgaccagcggcgtgcacaccttcccagctgtcctacagtcctcaggactctactccctcagcagcgtggtgaccgtgccctccagcaacttcgg

SEQ ID NO: 1691 - DNA, 540 bp, Human
caggtccagctggtgcaatctggggctgaggtgaagaagcctgggtcctcggtgaaggtctcctgcaaggcttctggaggcaccttcagcagctatactatcagctgggtgcgacaggcccctggacaaggccttgagtggatgggaaggatcatccctgtccgtgatatagcaaactacgcacagaagttccagggcagagtcacgattaccgcggacaaatccacgaggacagcctacatggaggtgagcagcctgagatctgaggacacggccgtgtattactgtgcggcaacggagctccgctcggatggtcttgacatctggggccaagggacaatggtcaccgtctcttcagcctccaccaagggcccatcggtcttccccctggcaccctcctccaagagcacctctgggggcacagcggccctgggctgcctggtcaaggactacttccccgaaccggtgacggtgtcgtggaactcaggcgccctgaccagcggcgtgcacaccttcccggctgtcctacagtcctcagga

SEQ ID NO: 1692 - DNA, 534 bp, Human
caggttcagctggtgcagtctggagctgaggtgaagaagcctggggcctcagtgaaggtctcctgcaaggcttctggttacaccttttccaactacggtatcagctgggtgcgacaggcccctggacaagggcttgagtggatgggatggatcagcgcttacaatggtaacactaagtatccacaaaagctccagggcagagtcaccatgagcacagacacatccacgagcacagcctacatggagctgaggagcctgagatctgacgacacggccgtgtattactgtgcgagagagacgcggtacggtatggacgtctggggccaagggaccacggtcaccgtctcctcagcctccaccaagggcccatcggtcttccccctggcaccctcctccaagagcacctctgggggcacagcggccctgggctgcctggtcaaggactacttccccgaaccggtgacggtgtcgtggaactcaggcgccctgaccagcggcgtgcacaccttcccggctgtcctacagtcctcagga

SEQ ID NO: 1693 - DNA, 543 bp, Human
gaggtgcagctggtgcagtctggagcagaggtgaaaaagcccggggagtctctgaagatctcctgtaagggttctggatacacctttaccagctactggatcggctgggtgcgccagatgcccgggaaaggcctggagtggatggggatcatctatcttggtgactctgatacgagatacagcccgtccttccaaggccaggtcaccatctcagccgacaagtccatcagcaccgcctacctgcagtggaacagcctgaaggcctcggacaccgccatgtattactgtgcgagacaggttaccggaactacgagctggttcgacccctggggccagggaaccctggtcaccgtctcctcagcctccaccaagggcccatcggtcttccccctggcaccctcctccaagagcacctctgggggcacagcggccctgggctgcctggtcaaggactacttccccgaaccggtgacggtgtcgtggaactcaggcgccctgaccagcggcgtgcacaccttcccggctgtcctacagtcctcagga

SEQ ID NO: 1694 - DNA, 432 bp, Human
gaggtgcagctggtggagtctgggggagacgtggtccagcctggggggtccctgagactctcctgtgcagcctctggaattacctttagtaactattggatgacctgggtccgccaggctccagggaaagggctggagtgggtggccaccataaagaaggatggaggggagcagtactatgtggactctgtgaagggccgattcaccatctccagagacaacgccaggaattcactgtatctacaaataaacagcctgagggccgaggatacggctgtctattactgtgcgaggggtggatctagcagcagctactactggatctactggggccagggaaccctggtcaccgtctcctcagggagtgcatccgccccaacccttttccccctcgtctcctgtgagaattccccgtcggatacgagcagcgtg

SEQ ID NO: 1695 - DNA, 549 bp, Human
gaggtgcagctggtggagtctgggggaggcctggtcaagcctggggggtccctgagactctcctgtgcagcctctggattcaccttcagtagctatagcatgaactgggtccgccaggctccagggaaggggctggagtgggtctcgtccattagtagtagtagtagttacatatactacgcagactcagtgaagggccgattcaccatctccagagacaacgccaagaattcactgtatctgcaactgaacagcctgagagccgaggacacggctgtgtactactgtgcgagagatcgggaccagttgatattctcggccgcttttgatatctggggccaagggacaatggtcaccgtctcttcagcctccaccaagggcccatcggtcttccccctggcaccctcctccaagagcacctctgggggcacagcggccctgggctgcctggtcaaggactacttccccgaaccggtgacggtgtcgtggaactcaggcgccctgaccagcggcgtgcacaccttcccggctgtcctacagtcctcagga

SEQ ID NO: 1696 - DNA, 543 bp, Human
gaggtgcagctggtggagtctgggggaggcttggtacagcctggggggtccctgagactctcctgtgcagcctctggattcacctttagcagctatgccatgagttgggtccgccaggctccagggaaggggctggagtgggtctcagctattagtggtagtggtggtagcacatactacgcagactccgtgaagggccggttcaccatctccagagccaattccaagaacacgctgtatctgcaaatgaacagcctgagagccgaggacacggccgtatattactgtgcgaaaggcccgcgctttagtcgcgactactttgactactggggccagggaaccctggtcaccgtctcctcagcctccaccaagggcccatcggtcttccccctggcaccctcctccaagagcacctctgggggcacagcggccctgggctgcctggtcaaggactacttccccgaaccggtgacggtgtcgtggaactcaggcgccctgaccagcggcgtgcacaccttcccggctgtcctacagtcctcagga

SEQ ID NO: 1697 - DNA, 541 bp, Human
caggtccagctggtgcaatctggggctgaggtgaagaagcctgggtcctcggtgaaggtctcctgcaaggcttctggaggcaccttcagcagatatactatcagctgggtgcgacaggcccctggacaagggcttgagtggatgggaaggatcatccctatacttggtacagcaaactacgcacagaatttccagggcagagtcacgattaccgcggacaaatccacgagcacagcctacatggagctgagtagcctgagatctgaggacacggccgtgtattactgtgcgagacacggatacagctatggtccctttgactactggggccagggaaccctggtcaccgtctcctcagcctccaccaagggcccatcggtcttccccctggcaccctcctccaagagcacctctgggggcacagcggccctgggctgcctggtcaaggactacttccccgaaccggtgacggtgtcgtggaactcaggcgccctgaccagcggcgtgcacaccttcccggctgtcctacagtcctcaggag

SEQ ID NO: 1698 - DNA, 555 bp, Human
caggtgcggctgcaggagtcgggcccaggactggtgaagccttcacagaccctgtccctcacctgcactgtctctggtggctccatcagcagtggtagttactactggagctggatccggcagcccgccgggaagggactggagtggattgggcgtttccataccagtgggagcaccaactacaatccctccctcaagagtcgagtcaccatatcagtagacacgtccaagaaccagttctccctgaagctgagttctgtgaccgccgcagacacggccgtgtattactgtgcgagagatttaaagggaaagacgtggatacagaccccctttgactactggggccagggaatcctggtcaccgtctcctcagcctccaccaagggcccatctgtcttccccctggcaccctcctccaagagcacctctgggggcacagcggccctgggctgcctggtcaaggactacttccccgaaccggtgacggtgtcgtggaactcaggcgctctgaccagcggcgtgcacaccttcccggctgtcctacagtcctcagga

SEQ ID NO: 1699 - DNA, 479 bp, Human
gaggtgcagctggtggagtctgggggaggcttggtccagcctggggggtccctgagactctcctgtgcagcctctggactcacctttagtagctattggatgagctgggcccgccaggctccagggaaggggctggagtgggtggccaatataaagaaagatggaagtgagaaatactatgtggactctgtgaagggccgattcaccatctccagagacaacgccaagaactcactgtatctgcaaatgaacagcctgagagtcgaggacacggctgtgtattactgtgcgagtgaacctccccactacggtggtaactccggggctgaatacttccagcactggggccagggcaccctggtcaccgtctcctcagcacccaccaaggctccggatgtgttccccatcatatcagggtgcagacacccaaaggataacagccctgtggtcctggcatgcttgataactgggtaccaccc

SEQ ID NO: 1700 - DNA, 549 bp, Human
caggtgcagctggtgcagtctggggctgaggtgaagaagcctggggcctcagtgaaggtctcctgcaaggcttctggatacatcttcaccggctattatatgcactgggtgcgacaggcccctggacaagggcttgagtggatgggatggatcaaccctaacagtggtggcactaactatgcacagaagtttcagggcagggtcaccatgaccagggacacgtccatcaccacagcctacatggagctgagcaggctgagatctgacgacacggccttttattactgtgcgagagtcaagaggttttcgatttttggagtggagcttgactactggggccagggaaccctggtcaccgtctcctcagcctccaccaagggcccatcggtcttccccctggcaccctcctccaagagcacctctgggggcacagcggccctgggctgcctggtcaaggactacttccccgaaccggtgacggtgtcgtggaactcaggcgccctgaccagcggcgtgcacaccttcccggctgtcctacagtcctcagga

SEQ ID NO: 1701 - DNA, 403 bp, Human
caggtgcagctgcaggagtcgggcccaggactggtgaagccttcggagaccctgtccctcacctgcactgtctctggtggctccatcagtagttactactggagctggatccggcagcccccagggaagggactggagtggattgggtatatctattacagtgggagcaccaactacaacccctccctcaagagtcgagtcaccatatcagtagacacgtccaagaaccagttctccctgaagctgagctctgtgaccgccgcagacacggccgtgtattactgtgcgagacatcaatcgcggtggaatatagtggctacgatggactttgactactggggccagggaaccctggtcaccgtctcctcagcctccaccaagggcccatcggtcttccccctgg

SEQ ID NO: 1702 - DNA, 555 bp, Human; identical to SEQ ID NO: 1698

SEQ ID NO: 1703 - DNA, 549 bp, Human
caggtgcagctggtgcagtctggggctgaggtgaagaagcctggggcctcagtgaaggtctcctgcaaggcttctggatacaccttcaccggctactatatgcactgggtgcgacaggcccctggacaagggcttgagtggatgggatggatcaaccctaacagtggtggcacaaactatgcacagaagtttcagggcagggtcaccatgaccagggacacgtccatcaacacagcctacatggagctgagcaggctgagatctgacgacacggccgtgtattactgtacgagagtcgggaggttttcgatttttggagtggagcttgactactggggccagggaaccctggtcaccgtctcctcagcctccaccaagggcccatctgtcttccccctggcaccctcctccaagagcacctctgggggcacagcggccctgggctgcctggtcaaggactacttccccgaaccggtgacggtgtcgtggaactcaggcgccctgaccagcggcgtgcacaccttcccggctgtcctacagtcctcagga

SEQ ID NO: 1704 - DNA, 557 bp, Human
caggtgctcctggtgcagtctggggctgaggtgaagaagcctggggcctcagtgaaggtctcctgcaaggcttctggatacaccttcaccggctactatctgcactgggtgcgacaggcccctggacaagggcttgagtggatgggatggatcaaccctatcagtggtggcacaaactatgcacagaattttcaggacagggtcaccatgaccagggacacgtccatcatcacagcctacatggaactgagcaggctgagatctgacgacacggccgtgtattactgtgcgagacttgcctattattatgatagtagtgcttaccggggtgcttttgatatctggggccaagggacaatggtcaccgtctcttcagcctccaccaagggcccatctgtcttccccctggcaccctcctccaagagcacctctgggggcacagcggccctgggctgcctggtcaaggactacttccccgaaccggtgacggtgtcgtggaactcaggcgccctgaccagcggcgtgcacaccttcccggctgtcctacagtcctcagg

SEQ ID NO: 1705 - DNA, 564 bp, Human
caggtgcagctggtggagtctgggggaggcgtggtccagcctgggaggtccctgagactctcctgtgcagcgtctggattcaccttcagttactatggcatgcactgggtccgccaggctccaggcaaggggctggagtgggtggcagttatatggtatgatggaagtaataaacactatgcagactccgtgaagggccgattcaccatctccagagacaattccaagaacacgctgtatctgcaaatgaacagcctgagagccgaggacacggctgtgtactactgtgcgaaaaatgcggccccctattgtagtggtggtagctgctacggtacctactttgactactggggccagggaaccctggtcaccgtctcctcagcctccaccaagggcccatctgtcttccccctggcaccctcctccaagagcacctctgggggcacagcggccctgggctgcctggtcaaggactacttccccgaaccggtgacggtgtcgtggaactcaggcgccctgaccagcggcgtgcacaccttcccggctgtcctacagtcctcagga

SEQ ID NO: 1706 - DNA, 438 bp, Human
caggtccagctggtgcagtctggggctgaggtgaagaagcctgggtcctcggtgaaggtctcctgcaaggcttctggaggcaccttcagcagctatgctatcagctgggtgcgacaggcccctggacaagggcttgagtggatgggagggatcatccctatctttggtacagcaaagtacgcacagaagttccagggcagagtcacgattaccgcggacgaatccacgagcacagcctacatggagctgagcagcctgagatctgaggacacggccgtgtattactgtgcgagaggaaaagatggctacaatccctggggcgcttttgatatctggggccaagggacaatggtcaccgtctcttcagggagtgcatccgccccaacccttttccccctcgtctcctgtgagaattccccgtcggatacgagcagcgtg

SEQ ID NO: 1707 - DNA, 533 bp, Human
gaggtgcagctggtggagtctgggggaggcttggtccagcccggggggtccctgagactctcctgcgtagcctctggattcaccttcagtgactatgctatgcactgggtccgccaggctccagggaagggactggaatatattgcagctattagtagcaatgggggtaggacatattatgcagactctgtgaaggacaaattcaccatctccagagacaattccaagaacatcttgtatcttcacatgggcagcctgagagcggaggacacggctgtgtatttctgtgcgagagatccccagtcatgggtgacttccaccacagcccatttccagcactggggccagggcaccctggtcaccgtctcctcagcatccccgaccagccccaaggtcttcccgctgagcctctgcagcacccagccagatgggaacgtggtcatcgcctgcctggtccagggcttcttcccccaggagccactcagtgtgacctggagcgaaagcggacagggcgtgaccgccagaaacttccc

SEQ ID NO: 1708 - DNA, 549 bp, Human
caggtgcagctggtgcagtctggggctgaggtgaagaagcctggggcctcagtgaaggtctcctgcaaggcttctggatacaccttcaccggctactatatgcactgggtgcgtcaggcccctggacaagggcttgagtggatgggatggatcaaccctaacagtggtgccataaactatgcacagaagtttcagggcagggtcaccatgaccagggacacgtccatcagcacagcctacatggagctgagcagcctgagatctgacgacacggccgtgtattactgtgcgagagtcgggaggttttcgatttttggagtggagcttgataactggggccagggaaccctggtcaccgtctcctcagcctccaccaagggcccatctgtcttccccctggcaccctcctccaagagcacctctgggggcacagcggccctgggctgcctggtcaaggactacttccccgaaccggtgacggtgtcgtggaactcaggcgccctgaccagcggcgtgcacaccttcccggctgtcctacagtcctcagga

SEQ ID NO: 1709 - DNA, 438 bp, Human
caggtgcagctgcaggagtcgggcccaggactggtgaagccttcggagaccctgtccctcacctgcactgtctctggtggctccatcagtagttactactggagctggatccggcagcccccagggaagggactggagtggattgggtatatctattacagtgggagcaccaagtacaacccctccctcaagagtcgagtcaccatatcagtagacacgtccaagaagcagttctccctgaagttgagctctgtgaccgccgcagacacggccgtgtattactgtgcgagacatataaagataggagtggtcggaggccttacttttgacttctggggccagggaaccctggtcaccgtctcctcagggagtgcatccgccccaacccttttccccctcgtctcctgtgagaattccccgtcggatacgagcagcgtg

SEQ ID NO: 1710 - DNA, 438 bp, Human
caggtgcagctggtgcagtctggggctgaggtgaagaagcctggggcctcagtgaaggtctcctgcaaggcttctggatacaccttcaccggctactatatgcactgggtgcgacaggcccctggacaagggcttgagtggatgggatggatcaaccctaacagtggtggcacaaactatgcacagaagtttcagggcagggtcaccatgaccagggacacgtccatcagcacagcctacatggagctgagcaggctgagatgtgacgacacggccgtgtattactgtgcgagagcctcaactccgtatagcagtggctcctgggcggactactggggccagggaaccctggtcaccgtctcctcagggagtgcatccgccccaacccttttccccctcgtctcctgtgagaattccccgtcggatacgagcagcgtg

SEQ ID NO: 1711 - DNA, 536 bp, Human
tcctatgtgctgactcagccaccctcggtgtcagtggccccaggacagacggccaggattacctgtgggggaaacaacattggaagtaaaagtgtgcactggtaccagcagaagccaggccaggcccctgtgctggtcgtctatgatgatagcgaccggccctcagggatccctgagcgattctctggctccaactctgggaacacggccaccctgaccatcagcagggtcgaagccggggatgaggccgactattactgtcaggtgtgggatagtagtagtgagcattatgtcttcggaactgggaccaaggtcaccgtcctaggtcagcccaaggccaaccccactgtcactctgttcccgccctcctctgaggagctccaagccaacaaggccacactagtgtgtctgatcagtgacttctacccgggagctgtgacagtggcctggaaggcagatggcagccccgtcaaggcgggagtggagaccaccaaaccctccaaacagagcaacaacaagtacgcggccagcagcta

SEQ ID NO: 1712 - DNA, 476 bp, Human
gacatcgtgatgacccagtctccagactccctggctgtgtctctgggcgagagggccaccatcaactgcaagtccagccagactgttttatacagctccaacaataagaactacttagcttggtaccagcagaaaccaggacagcctcctaagttgctcatttactgggcatctacccgggaatccggggtccctgaccgattcagtggcagcgggtctgggacagatttcactctcaccatcagcagcctgcaggctggagatgtggcagtttattactgtcagcaatattataatactccggacactttcggcggagggaccaaggtggagatcaatcgaactgtggctgcaccatctgtcttcatcttcccgccatctgatgagcagttgaaatctggaactgcctctgttgtgtgcctgctgaataacttctatcccagagaggccaaagtacagtggaaggtggataacgc

SEQ ID NO: 1713 - DNA, 563 bp, Human
gaaattgtgttgacgcagtccccaggcaccctgtctttgtctccaggggaaagagccaccctctcctgcagggccagtcaggatattaccaacaacttcttagcctggtaccagcagaaagccggccaggctcccaaactcttcatctatggtgcatccaggagggcccctggcatcccacacaggttcagtggcagtgggtctgggacagacttcactctcaccatcagcagcctggagcctgaagattttgcagtatattactgtcagcagtacggtccctctccgacgttcggccaagggaccaaggtggaaatcaaacgaactgtggctgcaccatctgtcttcatcttcccgccatctgatgagcagttgaaatctggaactgcctctgttgtgtgcctgctgaataacttctatcccagagaggccaaagtacagtggaaggtggataacgccctccaatcgggtaactcccaggagagtgtcacagagcaggacagcaaggacagcacctacagcctcagcagcaccctgacgctgagcaaagcagactacgagaa

SEQ ID NO: 1714 - DNA, 545 bp, Human
cagtctgccctgactcagcctgcctccgtgtctgggtctcctggacagtcgatcaccatctcctgcactggaaccagcagtgacgttggtggttataactatgtctcctggtaccaacagcacccaggcaaagcccccaaactcatgatttatgatgtcagtaatcggccctcaggggtttctaatcgcttctctggctccaagtctggcaacacggcctccctgaccatctctgggctccaggctgaggacgaggctgattattactgcagctcatatacaagcagcagcactctcggagtgttcggcggagggaccaagctgaccgtcctaggtcagcccaaggctgccccctcggtcactctgttcccaccctcctctgaggagcttcaagccaacaaggccacactggtgtgtctcataagtgacttctacccgggagccgtgacagtggcctggaaggcagatagcagccccgtcaaggcgggagtggagaccaccacaccctccaaacaaagcaacaacaagtacgcggccagcagcta

SEQ ID NO: 1715 - DNA, 578 bp, Human
gatattgtgatgacccagactccactctcctcacctgtcacccttggacagccggcctccatctcctgcaggtctagtcaaagcctcgtacacagtgatggagacacctacttgagttggcttcagcagaggccaggccagcctccaagactcctaatttacaagatttctaaccggttctctggggtcccagacagattcagtggcagtggggcagggacagatttcacactgaaaatcagcagggtggaagctgaggatgtcggggtttattactgcatgcaagctacacaatttcctctcactttcggcggagggaccaaggtggagatcaaacgaactgtggctgcaccatctgtcttcatcttcccgccatctgatgagcagttgaaatctggaactgcctctgttgtgtgcctgctgaataacttctatcccagagaggccaaagtacagtggaaggtggataacgccctccaatcgggtaactcccaggagagtgtcacagagcaggacagcaaggacagcacctacagcctcagcagcaccctgacgctgagcaaagcagactacgagaa

SEQ ID NO: 1716 - DNA, 545 bp, Human
cagtctgccctgactcagcctccctccgcgtccgggtctcctggacagtcagtcaccatctcctgcactggaaccagcagtgacgttggtggttataactatgtctcctggtaccaacagcacccaggcaaagcccccaaactcatgatttatgaggtcagtaagcggccctcaggggtccctgatcgctactctggctccaagtctggcaacacggcctccctgaccgtctctgggctccaggctgaggatgaggctgattattactgcagctcatatgcaggcagcagcaatcatgtgatattcggcggagggaccaagctgaccgtcctaggtcagcccaaggctgccccctcggtcactctgttcccgccctcctctgaggagcttcaagccaacaaggccacactggtgtgtctcataagtgacttctacccgggagccgtgacagtggcctggaaggcagatagcagccccgtcaaggcgggagtggagaccaccacaccctccaaacaaagcaacaacaagtacgcggccagcagcta

SEQ ID NO: 1717 - DNA, 545 bp, Human
cagtctgccctgactcagcctgcctccgtgtctgggtctcctggacagtcgatcaccatctcctgcactggaaccagcagtgacgttggtggttataactatgtctcctggtaccaacaacacccaggcaaagcccccaaactcatgatttatgatgtcagtaatcggccctcaggggtttctaatcgcttctctggctccaagtctggcaacacggcctccctgaccatctctgggctccaggctgaggacgaggctgattattactgcagctcatatacaagcagcagcactctcggcgtcttcggaactgggaccaaggtcaccgtcctaggtcagcccaaggccaaccccactgtcactctgttcccgccctcctctgaggagctccaagccaacaaggccacactagtgtgtctgatcagtgacttctacccgggagctgtgacagtggcctggaaggcagatggcagccccgtcaaggcgggagtggagaccaccaaaccctccaaacagagcaacaacaagtacgcggccagcagcta

SEQ ID NO: 1718 - DNA, 577 bp, Human
cagtctgtgctgactcagccaccctcagcgtctgggacccccgggcagagggtcaccatctcttgttctggaagcagctccaacatcggaggtaatcctgtaaactggtaccagcagctcccaggaacggcccccaaactcctcatctatagtaataatcagcggccctcaggggtccctgaccgattctctggctccaagtctggcacctcagcctccctggccatcagtgggctccagtctgaggatgaggctgattattactgtgcagcatgggatgacagcctgaagggtccggtattcggcggagggaccaagctgaccgtcctaggtcagcccaaggctgccccctcggtcactctgttcccgccctcctctgaggagcttcaagccaacaaggccacactggtgtgtctcataagtgacttctacccgggagccgtgacagtggcctggaaggcagatagcagccccgtcaaggcgggagtggagaccaccacaccctccaaacaaagcaacaacaagtacgcggccagcagctacctgagcctgacgcctgagcagtggaagtcccaca

SEQ ID NO: 1719 - DNA, 562 bp, Human
gaaattgtgttgacgcagtctccaggcaccctgtctttgtctccaggggaaagagccaccctctcctgcagggccagtcagagtgttagcagcggttacttagcctggtaccagcaaaaacctggccaggctcccaggctcctcatctttggtgcatccagcagggccactggcatcccagacaggttcagtggcagtgggtctgggacagacttcactctcaccatcaacagactggagcctgaagattttgcagtgtattactgtcagcagtatggtagctcacggacgttcggccaagggaccaaggtggaaatcaaacgaactgtggctgcaccatctgtcttcatcttcccgccatctgatgagcagttgaaatctggaactgcctctgttgtgtgcctgctgaataacttctatcccagagaggccaaagtacagtggaaggtggataacgccctccaatcgggtaactcccaggagagtgtcacagagcaggacagcaaggacagcacctacagcctcagcagcaccctgacgctgagcaaagcagactacgaga

SEQ ID NO: 1720 - DNA, 542 bp, Human
cagtctgccctgactcagcctgcctccgtgtctgggtctcctggacagtcgatcaccatctcctgcactggaaccaccagtgacgttggtggttatgactatgtctcctggtaccaacagcacccaggcaaagcccccaaactcatactttctgaggtcagtaatcggccctcaggggtttctaatcgcttctctggctccaagtctggcaacacggcctccctgaccatctctgggctccaggctgaggacgaggctgattattactgcagctcatatccaagcagcagcactctagtcttcggaactgggaccaaggtcaccgtcttaggtcagcccaaggccaaccccactgtcactctgttcccgccctcctctgaggagctccaagccaacaaggccacactagtgtgtctgatcagtgacttctacccgggagctgtgacagtggcctggaaggcagatggcagccccgtcaaggcgggagtggagaccaccacaccctccaaacaaagcaacaacaagtacgcggccagcagcta

SEQ ID NO: 1721 - DNA, 542 bp, Human
cagtctgccctgactcagcctgcctccgtgtctgggtctcctggacagtcgatcaccatctcctgcactggaaccagcagtgacgttggtggttataactatgtctcctggtaccaacagcacccaggcaaagcccccaaactcatgatttatgaggtcactaatcggccctcaggggtttctaatcgcttctctggctccaggtctggcaacacggcctccctgaccatctctgggctccaggctgaggacgaggctgattattactgcagctcatatacaagcagcagcctttatgtcttcggaactgggaccaaggtcgccgtcctaggtcagcccaaggccaaccccactgtcactctgttcccgccctcctctgaggagcttcaagccaacaaggccacactggtgtgtctcataagtgacttctacccgggagccgtgacagtggcctggaaggcagatagcagccccgtcaaggcgggagtggagaccaccaaaccctccaaacagagcaacaacaagtacgcggccagcagcta

SEQ ID NO: 1722 - DNA, 458 bp, Human
gaaattgtgttgacacagtctccagccaccctgtctttgtctccaggggaaagagccaccctctcctgcagggccagtcagagtgttagcagctacctagcctggtaccaacagaaacctggccaggctcccaggctcctcatctatgatgcatccaacagggcctctggcatcccagccaggttcagtggcagtgggtcagggacagacttcactctcaccatcagcagcctagagcctgaagattttgcagtttattactgtcagcaacgtcgcaactggcctctcactttcggcggagggaccaaggtggagaccaaacgaactgtggctgcaccatctgtcttcatcttcccgccatctgatgagcagttgaaatctggaactgcctctgttgtgtgcctgctgaataacttctatcccagagaggccaaagtacagtggaaggtggataacgc

SEQ ID NO: 1723 - DNA, 458 bp, Human
gaaattgtgttgacgcagtctccaggcaccctgtctttgtctccaggggaaagagccaccctctcctgcagggccagtcagagtattagcagcagctacttagcctggtaccagcagaaacctggccaggctcccaggctcctcatctatggtgcatccagcagggccactggcatcccagacaggttcagtggcagtgggtctgggacagacttcactctcaccatcagcagactggagcctgaagattttgcagtgtattactgtcagcagtatggtagctcactcactttcggcggagggaccaaggtggagatcaaacgaactgtggctgcaccatctgtcttcatcttcccgccatctgatgagcagttgaaatctggaactgcctctgttgtgtgcctgctgaataacttctatcccagagaggccaaagtacagtggaaggtggataacgc

SEQ ID NO: 1724 - DNA, 455 bp, Human
gaaatagtgatgacgcagtctccagccaccctgtctgtgtctccaggggaaagagccaccctctcctgcagggccagtcagagtgttagcagcaacttagcctggtaccagcagaaacctggccaggctcccaggctcctcatctatggtgcatccaccagggccactggtatcccagccaggttcagtggcagtgggtctgggacagagttcactctcaccatcagcagcctgcagtctgaagattttgcagtttattactgtcagcagtatgataactggtggacgttcggccaagggaccaaggtggaaatcaaacgaactgtggctgcaccatctgtcttcatcttcccgccatctgatgagcagttgaaatctggaactgcctctgttgtgtgcctgctgaataacttctatcccagagaggccaaagtacagtggaaggtggataacgc

SEQ ID NO: 1725 - DNA, 545 bp, Human
cagcttgtgctgactcaatcgccctctgcctctgcctccctgggagcctcggtcaagctcacctgcactctgagcagtgggcacagcagctacaccatcgcatggcatcagcagcagccagagaagggccctcggtacttgatgaaagttaacagtgatggcagccacaccaagggggacgggatccctgatcgcttctcaggctccagctctggggctgagcgctacctcaccatctccagcctccagtctgaggatgaggctgactattactgtcagacctggggcactggcattcgagtattcggcggagggaccaagctgaccgtcctaggtcagcccaaggctgccccctcggtcactctgttcccgccctcctctgaggagcttcaagccaacaaggccacactggtgtgtctcataagtgacttctacccgggagccgtgacagtggcctggaaggcagatagcagccccgtcaaggcgggagtggagaccaccacaccctccaaacaaagcaacaacaagtacgcggccagcagcta

SEQ ID NO: 1726 - DNA, 461 bp, Human
gaaattgtgttgacgcagtctccaggcaccctgtctttgtctccaggggaaagagccaccctctcctgcagggccagtcagagtgttaccagcagctacttagcctggtaccagcagagacgtggccaggctcccaggctcctcatctatggtgcatccagcagggccactggcatcccagacaggttcagtggcagtgggtctgggacagacttcactctcaccatcagcagactggagcctgaagattttgcagtgtattactgtcagcagtatggtagctcacctctcactttcggcggagggaccaaggtggagatcaaacgaactgtggctgcaccatctgtcttcatcttcccgccatctgatgagcagttgaaatctggaactgcctctgttgtgtgcctgctgaataacttctatcccagagaggccaaagtacagtggaaggtggataacgc

SEQ ID NO: 1727 - DNA, 461 bp, Human
gacatccagatgacccagtctccatcctccctgtctgcatctgtaggagacagagtcaccatcacttgccgggcaagtcagagcattagcagctatttaaattggtatcagcagaaaccagggaaagcccctaagctcctgatctatgctgcatccagtttgcaaagtggggtcccatcaaggttcagtggcagtggatctgggacagatttcactctcaccatcagcagtctgcaacctgaagattttgcaacttactactgtcaacagagttacagtacccctcaactcactttcggcggagggaccaaggtggagatcaaacgaactgtggctgcaccatctgtcttcatcttcccgccatctgatgagcagttgaaatctggaactgcctctgttgtgtgcctgctgaataacttctatcccagagaggccaaagtacagtggaaggtggataacgc

SEQ ID NO: 1728 - DNA, 473 bp, Human
gatattgtgatgactcagtctccactctccctgcccgtcacccctggagagccggcctccatctcctgcaggtctagtcagagcctcctgcatagtaatggatacaactatttggattggtacctgcagaagccagggcagtctccacagctcctgatctatttgggttctaatcgggcctccggggtccctgacaggttcagtggcagtggatcaggcacagattttacactgaaaatcagcagagtggaggctgaggatgttggggtttattactgcatgcaacctctacaaactccttggacgttcggccaagggaccaaggtggaaatcaaacgaactgtggctgcaccatctgtcttcatcttcccgccatctgatgagcagttgaaatctggaactgcctctgttgtgtgcctgctgaataacttctatcccagagaggccaaagtacagtggaaggtggataacgc

SEQ ID NO: 1729 - DNA, 542 bp, Human
cagactgtggtgacccaggagccatcgttctcagtgtcccctggagggacagtcacactcacttgtggcttgagctctggctcagtctctactagttactaccccagctggtaccagcagaccccaggccaggctccacgcacgctcatctacagcacaaacaaacgctcttctggggtccctgatcgcttctctggctccatccttgggaacaaagctgccctcaccatcacgggggcccaggcagatgatgaatctgattattactgtgtgctctatatgggtagtggcatgtcggtgttcggcggagggaccaagctgaccgtcctaggtcagcccaaggctgccccctcggtcactctgttcccgccctcctctgaggagcttcaagccaacaaggccacactggtgtgtctcataagtgacttctacccgggagccgtgacagtggcctggaaggcagatagcagccccgtcaaggcgggagtggagaccaccacaccctccaaacaaagcaacaacaagtacgcggccagcagcta

SEQ ID NO: 1730 - DNA, 479 bp, Human
gacatcgtgatgacccagtctccagactccctggctgtgtctctgggcgagagggccaccatcaactgcaagtccagccagagtgttttatacagctccaacaataagaactacttagcctggtaccagcagaaaccaggacagcctcctaagctgctcatttactgggcatctacccgggaatccggggtccctgaccgattcagtggcagcgggtctgggacagatttcactctcaccatcagcagcctgcaggctgaagatgtggcagtttattactgtcagcaatattatagtactcctcccctcactttcggcggagggaccaaggtggagatcaaacgaactgtggctgcaccatctgtcttcatcttcccgccatctgatgagcagttgaaatctggaactgcctctgttgtgtgcctgctgaataacttctatcccagagaggccaaagtacagtggaaggtggataacgc

SEQ ID NO: 1731 - DNA, 561 bp, Human
gagattgtgttgacgcactctccaggcaccctgtctttgtctccaggggaaagagccaccctctcctgcagggccagtcagagtgtccgcagctacttagcctggtaccagcagaaacctggccaggctcccaggctcctcatctatggtgcatccagcagggccactggcatcccagacaggttcagtggcagtgggtctgggacagacttcactctcaccatcagcagactggagcctgacgattttgcagtgtattactgtcagcagtatggtagctcaccttggacgttcggccaagggaccaaggtggaaatcaaacgaactgtggctgcaccatctgtcttcatcttcccgccatctgatgagcagttgaaatctggaactgcctctgttgtgtgcctgctgaataacttctatcccagagaggccaaagtacagtggaaggtggataacgccctccaatcgggtaactcccaggagagtgtcacagagcaggacagcaaggacagcacctacagcctcagcagcaccctgacgctgagcaaagcagactacgag

SEQ ID NO: 1732 - DNA, 536 bp, Human
caggctgtggtgactcaggagccctcactgactgtgtccccaggagggacagtcactctcacctgtggctccagcactggagctgtcaccagtggtcattatccctactggttccagcagaagcctggccaagcccccaggacactgatttatgatacaagcaacaaacactcctggacacctgcccggttctcaggctccctccttgggggcaaagctgccctgaccctttcgggtgcgcagcctgaggatgaggctgagtattactgcttgctctcctatagtggttgggtgttcggcggagggaccaagctgaccgtcctaggtcagcccaaggctgccccctcggtcactctgttcccgccctcctctgaggagcttcaagccaacaaggccacactggtgtgtctcataagtgacttctacccgggagccgtgacagtggcctggaaggcagatagcagccccgtcaaggcgggagtggagaccaccacaccctccaaacaaagcaacaacaagtacgcggccagcagcta

SEQ ID NO: 1733 - DNA, 471 bp, Human
gacatccagatgacccagtctccatcctccctgtctgcatctctgggagacggggtcaccatcacttgccgggcaagtcagagcattagcagctatttaagttggtatcagcagaaacccgggaaagcccctaagctcctgatctatgctgcatccagtttgcaaagtggggtcccatcaaggttcagtggcagtggatctgggacagatttcactctcaccatcagcagtctgcaacctgaagattttgcaacttactactgtcaacagagttacaatacccccgtgacgttcggccaagggaccaaggtggaaatcaaacgaactgtggctgcaccatctgtcttcatcttcccgccatctgatgagcagttgaaatctggaactgcctctgttgtgtgcctgctgaataacttctatcccagagaggccaaagtacagtggaaggtggataacgcagatcggaagagc

SEQ ID NO: 1734 - DNA, 461 bp, Human
gaaattgtgttgacgcagtctccaggcaccctgtctttgtctccaggggaaagagccaccctctcctgcagggccagtcagagtgttagcagcagctacttagcctggtaccagcagaaacctggccaggctcccaggctcctcatctatggtgcatccagcagggccactgacatcccagacaggttcagtggcagtgggtctgggacagacttcactctcaccatcagcagactggagcctgaagattttgcagtgtattactgtcagcagtatggtagctcaccgtggacgttcggccaagggaccaaggtggaaatcaaacgaactgtggctgcaccatctgtcttcatcttcccgccatctgatgagcagttgaaatctggaactgcctctgttgtgtgcctgctgaataacttctatcccagagaggccaaagtacagtggaaggtggataacgc

SEQ ID NO: 1735 - DNA, 579 bp, Human
cagtctgtgctgacgcagccgccctcagtgtctggggccccagggcagagggtcaccatcccctgcactgggagcagcttcaacatcggggcaggttatgatgtacactggtaccagcagcttccaggaacagcccccaaactcctcatctttggtaacagcaatcggccctcaggggtccctgaccgattctctggctccaggtctggcacctcagcctccctggccatcactgggctccaggctgaggatgaggctgattattactgccagtcctatgacagtagcctgagtggtgtggtattcggcggagggactacgctgaccgtcctaggtcagcccaaggctgccccctcggtcactctgttcccgccctcctctgaggagcttcaagccaacaaggccacactggtgtgtctcataagtgacttctacccgggagccgtgacagtggcctggaaggcagatagcagccccgtcaaggcgggagtggagaccaccacaccctccaaacaaagcaacaacaagtacgcggccagcagctacctgagcctgacgcctgagcagtggaagtcccac

SEQ ID NO: 1736 - DNA, 530 bp, Human
tcctatgagctgactcagccaccctcagtgtccgtgtccccaggacagacagccagcatcacctgctctggggataaattgggggatagatatgtttgttggtatcagcagaagccaggtcagtcccctgtgctggtcatctatcaagataccaagcggccctcagggatccctgagcgattctctggctccaactctgggaacacagccactctgaccatcagcgggacccaggctatggatgaggctgactattactgtcaggcgtgggacagcagcacttgggtgttcggcggagggaccaagctgaccgtcctgggtcagcccaaggctgccccctcggtcactctgttcccgccctcctctgaggagcttcaagccaacaaggccacactggtgtgtctcataagtgacttctacccgggagccgtgacagtggcctggaaggcagatagcagccccgtcaaggcgggagtggagaccaccacaccctccaaacaaagcaacaacaagtacgcggccagcagcta

SEQ ID NO: 1737 - DNA, 461 bp, Human
gaaattgtgttgacgcagtctccaggcaccctgtctttgtctccaggggaaagagccaccctctcctgcagggccagtcagagtgttagcagcagctacttagcctggtaccagcagaaacctgaccaggctcccaggctcctcatctatggtgcatccagcagggccactggcatcccagacaggttcagtggcagtgggtctgggacagacttcactctcaccatcagcagactggagcctgaagattttgcagtgtattactgtcagcagtatggtagctcacctaacacttttggccaggggaccaagctggagatcaaacgaactgtggctgcaccatctgtcttcatcttcccgccatctgatgagcagttgaaatctggaactgcctctgttgtgtgcctgctgaataacttctatcccagagaggccaaagtacagtggaaggtggataacgc

SEQ ID NO: 1738 - DNA, 525 bp, Human
gccatccagttgacccagtctccatcctccctgtctgcatctgtaggagacagagtcaccatcacttgccgggcaagtcagggcattagcagtgctttagcctggtatcagcagaaaccagggaaagctcctaagctcctgatctatgatgcctccagtttggaaagtggggtcccatcaaggttcagcggcagtggatctgggacagatttcactctcaccatcagcagcctgcagcctgaagattttgcaacttattactgtcaacagtttaatagttacctcactttcggcggagggaccaaggtggagatcaaacgaactgtggctgcaccatctgtcttcatcttcccgccatctgatgagcagttgaaatctggaactgcctctgttgtgtgcctgctgaataacttctatcccagagaggccaaagtacagtggaaggtggataacgccctccaatcgggtaactcccaggagagtgtcacagagcaggacagcaaggacagcacctacagcctcagc

SEQ ID NO: 1739 - DNA, 542 bp, Human
cagactgtggtgacccaggagccatcgttctcagtgtcccctggagggacagtcacactcacttgtggcttgagctctggctcagtctctactagttactaccccagctggtaccagcagaccccaggccaggctccacgcacgctcatctacagcacaaacactcgctcttctggggtccctgatcgcttctctggctccatccttgggaacaaagctgccctcaccatcacgggggcccaggcagatgatgaatctgattattactgtgtgctgtatatgggtagtggcatttcggtgttcggcggagggaccaagctgaccgtcctaggtcagcccaaggctgccccctcggtcactctgttcccgccctcctctgaggagcttcaagccaacaaggccacactggtgtgtctcataagtgacttctacccgggagccgtgacagtggcctggaaggcagatagcagccccgtcaaggcgggagtggagaccaccacaccctccaaacaaagcaacaacaagtacgcggccagcagcta

SEQ ID NO: 1740 - DNA, 542 bp, Human
cagtctgtgctgactcagccaccctcagcgtctgggacccccgggcagagggtcaccatctcttgttctggaagcagctccaacatcggaagtaattatgtatactggtaccagcagctcccaggaacggcccccaaactcctcatctataggaataatcagcggccctcaggggtccctgaccgattctctggctccaagtctggcacctcagcctccctggccatcagtgggctccggtccgaggatgaggctgattattactgtgcagcatgggatgacagcctgagtggtcgggtgttcggcggagggaccaagctgaccgtcctaggtcagcccaaggctgccccctcggtcactctgttcccgccctcctctgaggagcttcaagccaacaaggccacactggtgtgtctcataagtgacttctacccgggagccgtgacagtggcctggaaggcagatagcagccccgtcaaggcgggagtggagaccaccacaccctccaaacaaagcaacaacaagtacgcggccagcagcta

SEQ ID NO: 1741 - DNA, 541 bp, Human
tcctatgtgctgactcagccaccctcggtgtcagtggccccaggacagacggccaggattacctgtgggggagacaacattggaagtaaaaatgtgcactggtaccagcagaagcccggccaggcccctgtgctggtcgtctttgatgatagcgaccggccctcagggatccctgagcgattctctggctccaactctgggaacacggccaccctgaccatcagcagggtcgaagccggggatgaggccgactattactgtcaggtgtgggatagtagtagtgatcactatgtggtattcggcggagggaccaagctgaccgtcctaggtcagcccaaggctgccccctcggtcactctgttcccgccctcctctgaggagcttcaagccaacaaggccacactggtgtgtctcataagtgacttctacccgggagccgtgacagtggcctggaaggcagatagcagccccgtcaaggcgggagtggagaccaccacaccctccaaacaaagcaacaacaagtacgcggccagcagctacc

SEQ ID NO: 1742 - DNA, 455 bp, Human
gaaatagtgatgacgcagtctccagccaccctgtctgtgtctccaggggaaagagccaccctctcctgcagggccagtcagagtgttagcagcaacttagcctggtaccagcagaaacctggccaggctcccaggctcctcatctatggtgcatccaccagggccactggtatcccagccaggttcagtggcagtgggtctgggacagagttcactctcaccatcagcagcctgcagtctgaagattttgcagtttattactgtcagcagtataataactggtggacgttcggccaagggaccaaggtggaaatcaaacgaactgtggctgcaccatctgtcttcatcttcccgccatctgatgagcagttgaaatctggaactgcctctgttgtgtgcctgctgaataacttctatcccagagaggccaaagtacagtggaaggtggataacgc

SEQ ID NO: 1743 - DNA, 458 bp, Human
gacatccagatgacccagtctccatcctccctgtctgcatctgtaggagaccgggtcaccatcacttgccgggcaagtcagagcattagaagctatttaaattggtatcagcagaaacgagggaaagcccctaagctcctgatctatgctgcatccagtttgcaaagtggggtcccatcaaggttcagtggcagtggatctgggacagatttcactctcaccatcagcagtctgcaacctgaagattttgcaacttactactgtcaacagagttacagtacccctccgacgttcggccaagggaccaaggtggaaatcaaacgaactgtggctgcaccatctgtcttcatcttcccgccatctgatgagcagttgaaatctggaactgcctctgttgtgtgcctgctgaataacttctatcccagagaggccaaagtacagtggaaggtggataacgc

SEQ ID NO: 1744 - DNA, 528 bp, Human
gaaattgtgttgacacagtctccagccaccctgtctttgtctccaggggaaagagccaccctctcctgcagggccagtcagagtgttagcagctacttagcctggtaccaacagaaacctggccaggctcccaggctcctcatctatgatgcatccaacagggccactggcatcccagccaggttcagtggcagtgggtctgggacagacttcactctcaccatcagcagcctagagcctgaagattttgcagtttattactgtcagcagcgtagcaactggcctccgatcactttcggccctgggaccaaagtggatatcaaacgaactgtggctgcaccatctgtcttcatcttcccgccatctgatgagcagttgaaatctggaactgcctctgttgtgtgcctgctgaataacttctatcccagagaggccaaagtacagtggaaggtggataacgccctccaatcgggtaactcccaggagagtgtcacagagcaggacagcaaggacagcacctacagcctc

SEQ ID NO: 1745 - DNA, 562 bp, Human
gccatccagttgacccagtctccatcctccctgtctgcatctgtaggagacagagtcaccatcacttgccgggcaagtcagggcattagcagtgctttagcctggtatcagcagacaccagggaaagctcctaagctcctgatctatgatgcctccagtttggaaagtggggtcccgtcaaggttcagcggcagtggatctgggacagatttctctctcaccatcggcagcctgcagcctgaagattttgcaagttattactgtcaacagtttaatagttaccctctcactttcggcggagggaccaaggtggagatcaaacgaactgtggctgcaccatctgtcttcatcttcccgccatctgatgagcagttgaaatctggaactgcctctgttgtgtgcctgctgaataacttctatcccagagaggccaaagtacagtggaaggtggataacgccctccaatcgggtaactcccaggagagtgtcacagagcaggacagcaaggacagcacctacagcctcagcagcaccctgacgctgagcaaagcagactacgaga

SEQ ID NO: 1746 - DNA, 542 bp, Human
caggcagggctgactcagccaccctcggtgtccaagggcttgagacagaccgccacactcacctgcactgggagcagcaacaatgttggcaaccaaggagcagcttggttgcagcagcaccagggccaccctcccaaactcctatcctacaggaataacaaccggccctcagggatctcagagagattctctgcatccaggtcaggaaacacagcctccctgaccattactggactccagcctgaggacgaggcagactattactgctcagcatgggacagcagcctctctaattgggtgttcggcggagggaccaagctgaccgtcctaggtcagcccaaggctgccccctcggtcactctgttcccgccctcctctgaggagcttcaagccaacaaggccacactggtgtgtctcataagtgacttctacccgggagccgtgacagtggcctggaaggcagatagcagccccgtcaaggcgggagtggagaccaccacaccctccaaacaaagcaacaacaagtacgcggccagcagcta

SEQ ID NO: 1747 - DNA, 560 bp, Human
cagtctgccctgactcagcctgcctccgtgtctgggtctcctggacagtcgatcaccatctcctgcactggaaccagcagtgacgttggtggttataactatgtctcctggtaccaacaacacccaggcaaagcccccaaactcatgatttatgatgtcagtaatcggccctcaggggtttctaatcgcttctctggctccaagtctggcaacacggcctccctgaccatctctgggctccaggctgaggacgaggctgattattactgcaactcatatacaagcagcagcactctcgtggtattcggcggagggaccaagctgaccgtcctaggtcagcccaaggctgccccctcggtcactctgttcccgccctcctctgaggagcttcaagccaacaaggccacactggtgtgtctcataagtgacttctacccgggagccgtgacagtggcctggaaggcagatagcagccccgtcaaggcgggagtggagaccaccacaccctccaaacaaagcaacaacaagtacgcggccagcagctatctgagcctgacgcc

SEQ ID NO: 1748 - DNA, 533 bp, Human
tcctatgagctgacacagccaccctcggtgtcagtgtccctaggacagatggccaggatcacctgctctggagaagcattgccaaaaaaatatgcttattggtaccagcagaagccaggccagttccctatactggtgatatataaagacagcgagaggccctcagggatccctgagcgattctctggctccagctcagggacaatagtcacattgaccatcagtggagtccaggcagaagacgaggctgactattactgtctatcagaagacagcagtggtacttgggtgttcggcggagggaccaagctgaccgtcctaggtcagcccaaggctgccccctcggtcactctgttcccgccctcctctgaggagcttcaagccaacaaggccacactggtgtgtctcataagtgacttctacccgggagccgtgacagtggcctggaaggcagatagcagccccgtcaaggcgggagtggagaccaccacaccctccaaacaaagcaacaacaagtacgcggccagcagcta

SEQ ID NO: 1749 - DNA, 532 bp, Human
tcctatgagctgactcagccaccctcagtgtccgtgtccccaggacagacagccagcatcacctgctctggagataaattgggggataaatatgcttgctggtatcagcagaagccaggccagtcccctgtgctggtcatctatcaagatagcaagcggccctcagggatccctgagcgattctctggctccaactctgggaacacagccactctgaccatcagcgggacccaggctatggatgaggctgactattactgtcaggcgtgggacagcagcactgtggtattcggcggagggaccaagctgaccgtcctaggtcagcccaaggctgccccctcggtcactctgttcccgccctcctctgaggagcttcaagccaacaaggccacactggtgtgtctcataagtgacttctacccgggagccgtgacagtggcctggaaggcagatagcagccccgtcaaggcgggagtggagaccaccacaccctccaaacaaagcaacaacaagtacgcggccagcagctacc

SEQ ID NO: 1750 - DNA, 530 bp, Human
tcctatgagctgactcagccaccctcagtgtccgtgtccccaggacagacagccagcatcacctgctctggagataaattgggggataaatatgcttgctggtatcagcagaagccaggccagtcccctgtgctggtcatctatcaagatagcaagcggccctcagggatccctgagcgattctctggctccaactctgggaacacagccactctgaccatcagcgggacccaggctatggatgaggctgactattactgtcaggcgtgggacagcagctctgtggtattcggcggagggaccaagctgaccgtcctaggtcagcccaaggctgccccctcggtcactctgttcccgccctcctctgaggagcttcaagccaacaaggccacactggtgtgtctcataagtgacttctacccgggagccgtgacagtggcctggaaggcagatagcagccccgtcaaggcgggagtggagaccaccacaccctccaaacaaagcaacaacaagtacgcggccagcagcta

SEQ ID NO: 1751 - DNA, 458 bp, Human
gacatccagatgacccagtctccttccaccctgtctgcatctgtaggagacagagtcaccatcacttgccgggccagtcagagtattagtagctggttggcctggtatcagcagaaaccagggaaagcccctaagctcctgatctataaggcgtctagtttagaaagtggggtcccatcaaggttcagcggcagtggatctgggacagaattcactctcaccatcagcagcctgcagcctgatgattttgcaacttattactgccaacagtataatagttattcgtggacgttcggccaagggaccaaggtggaaatcaaacgaactgtggctgcaccatctgtcttcatcttcccgccatctgatgagcagttgaaatctggaactgcctctgttgtgtgcctgctgaataacttctatcccagagaggccaaagtacagtggaaggtggataacgc

SEQ ID NO: 1752 - DNA, 582 bp, Human
cagtctgtgctgacgcagccgccctcagtgtctggggccccagggcagagggtcaccatctcttgcactgggagcaggtccaacatcggggcaggttatgatgtacagtggtaccagcaggttccaggaacagcccccaaactcctcatctctggtaacagcaatcggccctcaggggtccctgaccgattctctggctccaagtctggcacctcagcctccctggccatcactgggctccaggctgaggatgaggctgattattactgccagtcctatgacagcagcctgagtggtctgagggtattcggcggagggaccaagctgaccgtcctaggtcagcccaaggctgccccctcggtcactctgttcccgccctcctctgaggagcttcaagccaacaaggccacactggtgtgtctcataagtgacttctacccgggagccgtgacagtggcctggaaggcagatagcagccccgtcaaggcgggagtggagaccaccacaccctccaaacaaagcaacaacaagtacgcggccagcagctatctgagcctgacgcctgagcagtggaagtcccac

SEQ ID NO: 1753 - DNA, 560 bp, Human
gacatccagatgacccagtctccttccaccctgtctgtatctgtaggagacagagtcaccatcacttgccgggccagtcagagtgttagtagctggttggcctggtatcagcagaaaccagggaaagcccctaagctcctgatctatgatgcctccagtttggaaagtggggtcccatcaaggttcagcggcagtggatctgggacagaattcactctcaccattagcagcctgcagcctgatgattttgcaacttattactgccaacagtataatagtttctacacttttggccaggggaccaagctggagatcaaacgaactgtggctgcaccatctgtcttcatcttcccgccatctgatgagcagttgaaatctggaactgcctctgttgtgtgcctgctgaataacttctatcccagagaggccaaagtacagtggaaggtggataacgccctccaatcgggtaactcccaggagagtgtcacagagcaggacagcaaggacagcacctacagcctcagcagcaccctgacgctgagcaaagcagactacgagaa

SEQ ID NO: 1754 - DNA, 581 bp, Human
gatattgtgatgactcagtctccactctccctgcccgtcacccctggagagccggcctccatctcctgcaggtctagtcagagcctcctgcatagtaatggatacaactatttggattggtacctgcagaagccagggcagtctccacagctcctgatctatttgggttctaatcgggcctccggggtccctgacaggttcagtggcagtggatcaggcacagattttacactgaaaatcagcagagtggaggctgaggatgttggggtttattactgcatgcaagctctacaaactcctcagtacacttttggccaggggaccaagctggagatcaaacgaactgtggctgcaccatctgtcttcatcttcccgccatctgatgagcagttgaaatctggaactgcctctgttgtgtgcctgctgaataacttctatcccagagaggccaaagtacagtggaaggtggataacgccctccaatcgggtaactcccaggagagtgtcacagagcaggacagcaaggacagcacctacagcctcagcagcaccctgacgctgagcaaagcagactacgagaa

SEQ ID NO: 1755 - DNA, 560 bp, Human
gacatccagatgacccagtctccatcctccctgtctgcatctgtaggagacagagtcaccatcacttgccgggcaagtcagagcattagcaactatttaaattggtatcagcagaaaccagggaaagcccctgacctcctgatctatgctgcatccagtttgcaaagtggggtcccattaaggttcagtggcagtggatctgggacagatttcactctcaccatcagcagtctgcaacctgaagattttgcaacttactactgtcaacagacttacagtgcccccactttcggcggagggaccaaggtggagatcaaacgaactgtggctgcaccatctgtcttcatcttcccgccatctgatgagcagttgaaatctggaactgcctctgttgtgtgcctgctgaataacttctatcccagagaggccaaagtacagtggaaggtggataacgccctccaatcgggtaactcccaggagagtgtcacagagcaggacagcaaggacagcacctacagcctcagcagcaccctgacgctgagcaaagcagactacgagaa

SEQ ID NO: 1756 - DNA, 536 bp, Human
cagtctatgctgactcagccaccctcagcgtctgggacccccgggcagagggtcaccatctcttgttctggaagcagctccaacatcggaagtaattatgtatactggtaccagcagctcccaggaacggcccccaaactcctcatctataggaataatcagcggccctcaggggtccctgaccgattctctggctccaagtctggcacctcagcctccctggccatcagtgggctccggtccgaggatgaggctgattattactgtgcagcatgggatgacagacgttgggtgttcggcggagggaccaagctgaccgtcctaggtcagcccaaggctgccccctcggtcactctgttcccaccctcctctgaggagcttcaagccaacaaggccacactggtgtgtctcataagtgacttctacccgggagccgtgacagtggcctggaaggcagatagcagccccgtcaaggcgggagtggagaccaccacaccctccaaacaaagcaacaacaagtacgcggccagcagcta

SEQ ID NO: 1757 - DNA, 583 bp, Human
cagtctgccctgactcagcctcgctcagtgtccgggtctcctggacagtcagtcactatctcctgcactggaaccagcagtgatgttggtggttataagtatgtctcctggtaccaacagcacccaggcaaagcccccaaactcatgatttatgacgtcagtaagcggccctcaggggtccctgatcgcttctctggctccaagtctggcaacacggcctccctgaccatctctgggctccaggctgaggatgagggtgattattactgctgctcatatgcaggcacctacagtttggtattcggcggagggaccaaggtgaccgtgaccgtcctaggtcagcccaaggctgccccctcggtcactctgttcccgccctcctctgaggagcttcaagccaacaaggccacactggtgtgtctcataagtgacttctacccgggagccgtgacagtggcctggaaggcagatagcagccccgtcaaggcgggagtggagaccaccacaccctccaaacaaagcaacaacaagtacgcggccagcagctatctgagcctgacgcctgagcagtggaagtcccaca

SEQ ID NO: 1758 - DNA, 569 bp, Human
gaaattgtgttgacgcagtctccaggcaccctgtctttgtctccaggggaaagagccaccctctcctgcagggccagtcagagtcttagcagcagctacttagcctggtaccagcagaaacctggccagtctcccaggctcctcatttatggtgcatccagcagggccactggcatcccagacaggttcagtggcagtgggtctgggacagacttcactctcaccatcaacagactggagcctgaagattttgcagtatattactgtcagcagtatcgtacctcacctcgaggcactttcggcggagggaccaaggtggagatcaaacgaactgtggctgcaccatctgtcttcatcttcccgccatctgatgagcagttgaaatctggaactgcctctgttgtgtgcctgctgaataacttctatcccagagaggccaaagtacagtggaaggtggataacgccctccaatcgggtaactcccaggagagtgtcacagagcaggacagcaaggacagcacctacagcctcagcagcaccctgacgctgagcaaagcagactacgagaa

SEQ ID NO: 1759 - DNA, 563 bp, Human
gacatccagatgacccagtctccatcctccctgtctgcatctgtaggagacagagtcaccatcacttgccgggcaagtcagagcattagcagctatttaaattggtatcagcagaaaccagggaaagcccctaagctcctgatctatgctgcatccagtttgcaaagtggggtcccatcaaggttcagtggcagtggatctgggacagatttcactctcaccatcagcagtctgcaacctgaagattttgcaatttactactgtcaacagacttcccgtaccccgctcactttcggcggagggaccaaggtggaggtcaaacgaactgtggctgcaccatctgtcttcatcttcccgccatctgatgagcagttgaaatctggaactgcctctgttgtgtgcctgctgaataacttctatcccagagaggccaaagtacagtggaaggtggataacgccctccaatcgggtaactcccaggagagtgtcacagagcaggacagcaaggacagcacctacagcctcagcagcaccctgacgctgagcaaagcagactacgagaa

SEQ ID NO: 1760 - DNA, 563 bp, Human
gacatccagatgacccagtctccatctgccatgtctgcatctgtaggagacagagtcaccatcacttgtcgggcgagtcaggacattaacacctttttaacgtggtttcagcagaaaccaggaaaagtccctcagcgcctgatctttgctgcatatcgtttgcaaagtggggtcccttcaaggttcagtggcagtggatctgggacagaattcactctcacaatcaacagcctgcagcctgaagatgttgcgacttattattgtctacaccataaaacttatccgtacacttttggccaggggaccaaactggagatcaaacgaactgtggctgcaccatctgtcttcatcttcccgccatctgatgagcagttgaaatctggaactgcctctgttgtgtgcctgctgaataacttctatcccagagaggccaaagtacagtggaaggtggataacgccctccaatcgggtaactcccaggagagtgtcacagagcaggacagcaaggacagcacctacagcctcagcagcaccctgacgctgagcaaagcagactacgagaa

SEQ ID NO: 1761 - DNA, 563 bp, Human
gacatccagatgacccagtctccttccaccctgtctgcatctgtgggagacagagtcaccatcacttgccgggccagtcagagtattactagttggttggcctggtatcagcagaaatcagggaaagcccctaaactcctgatctatgatgcctccagtttggaaagtggggtcccatcaaggttcagcggcagtggatctgggacagaattcactctcaccatcagcagcctgcagcctgatgattttgcaacttattactgccaacagtataatagttatccttggacgttcggccaagggaccaaggtggaaatcaaacgaactgtggctgcaccatctgtcttcatcttcccgccatctgatgagcagttgaaatctggaactgcctctgttgtgtgcctgctgaataacttctatcccagagaggccaaagtacagtggaaggtggataacgccctccaatcgggtaactcccaggagagtgtcacagagcaggacagcaaggacagcacctacagcctcagcagcaccctgacgctgagcaaagcagactacgagaa

SEQ ID NO: 1762 - DNA, 574 bp, Human
gatattgtgatgactcagtctccactctccctgcccgtcacccctggagagccggcctccatctcctgcaggtctagtcagagcctcctgcatagtaatggatacaactatttggattggtacctgcagaagccagggcagtctccacagctcctgatctatttgggttctaatcgggcctccggggtccctgacaggttcagtggcagtgcatcaggcacagattttacactgaaaatcagcagagtggaggctgaggatgttggggtttattactgcatgcaagctctacaagctttcactttcggccctgggaccaaagtggatatcaaacgaactgtggctgcaccatctgtcttcatcttcccgccatctgatgagcagttgaaatctggaactgcctctgttgtgtgcctgctgaataacttctatcccagagaggccaaagtacagtggaaggtggataacgccctccaatcgggtaactcccaggagagtgtcacagagcaggacagcaaggacagcacctacagcctcagcagcaccctgacgctgagcaaagcagactacgaga

SEQ ID NO: 1763 - DNA, 458 bp, Human
gacatccagatgacccagtctccttccaccctgtctgcatctgtaggagacagagtcaccatcacttgccgggccagtcagagtattagtagctggttggcctggtatcagcagaaaccagggaaagcccctaacctcctgatctatgatgcctccagtttggaaagtggggtcccatcaaggttcagcggcagtggatctgggacagaattcactctcaccatcagcagcctgcagcctgatgattttgcaacttattactgccaacagtataatagttatccgtggacgttcggccaagggaccaaggtggaaatcaaacgaactgtggctgcaccatctgtcttcatcttcccgccatctgatgagcagttgaaatctggaactgcctctgttgtgtgcctgctgaataacttctatcccagagaggccaaagtacagtggaaggtggataacgc

SEQ ID NO: 1764 - DNA, 545 bp, Human
cagtctgtgctgacgcagccgccctcagtgtctgaggccccagggcagagggtcaccatctcctgcactgggagcagctccaacatcggggcaggttatgatgtacactggtaccagcagcttccaggaacagcccccaaactgctcatctatggtaacattaatcggccctcaggggtccctgaccgattctctggctccaagtctggcacctcagcctccctggccatcactgggctccaggctgaggatgaggctgattattactgccagtcctatgacaacagcctgaatggttcggtgttcggcggagggaccaaactgaccgtcctacgtcagcccaaggctgccccctcggtcactctgttcccaccctcctctgaggagcttcaagccaacaaggccacactggtgtgtctcataagtgacttctacccgggagccgtgacagtggcctggaaggcagatagcagccccgtcaaggcgggagtggagaccaccacaccctccaaacaaagcaacaacaagtacgcggccagcagcta

SEQ ID NO: 1765 - DNA, 565 bp, Human
gaaattgtgttgacgcagtctccaggcaccctgtctttgtctccaggggaaagagccaccctctcatgtagggccagtcagagtgttagcagcaacttcctagcctggtaccagcagaaacctggccagcctcccaggctcctcatctatggtgcatccgtcagggccactggcatcccagacaggttcagtggcagtgggtctgggacagacttcactctcaccatcaccagactggagcctgaagattttgcagtatattactgtcagcagtatggtagcttacctcggacgttcggccaagggaccaaggtggaaatcaaacgaactgtggctgcaccatctgtcttcatcttcccgccatctgatgagcagttgaaatctggaactgcctctgttgtgtgcctgctgaataacttctatcccagagaggccaaagtacagtggaaggtggataacgccctccaatcgggtaactcccaggagagtgtcacagagcaggacagcaaggacagcacctacagcctcagcagcaccctgacgctgagcaaagcagactacgaga

SEQ ID NO: 1766 - DNA, 564 bp, Human
catccagatgacccagtctccttccaccctgtctgcatctgtaggagacagagtcaccatcacttgccgggccagtcagagtattagtagctggttggcctggtatcagcagaaaccagggaaagcccctaagctcctgatctatgatgcctccagtttgcaaagtggggtcccatcaaggttcagcggcagtggatctgggacagaattcactctcaccatcagcagcctgcagcctgatgattttgcaacttattactgccaacagtataatagttattctccgatcaccttcggccaagggacacgactcgagattaaacgaactgtggctgcaccatctgtcttcatcttcccgccatctgatgagcagttgaaatctggaactgcctctgttgtgtgcctgctgaataacttctatcccagagaggccaaagtacagtggaaggtggataacgccctccaatcgggtaactcccaggagagtgtcacagagcaggacagcaaggacagcacctacagcctcagcagcaccctgacgctgagcaaagcagactacgagaa

SEQ ID NO: 1767 - DNA, 565 bp, Human
tcctatgagctgactcagccaccctcagtgtccgtgtccccaggacagacagccagcatcacctgctctggagataaattgggggataaatatgcttgctggtatcagcaaaagccaggccagtcccctgtgctggtcatctatcaagataccaagcggccctcagggatccctgagcgattctctggctccaactctgggaacacagccactctgaccatcagcgggacccaggctatggatgaggctgactattactgtcaggcgtgggacagtagcactgtgttattcggcggagggaccaagctgaccgtcctaggtcagcccaaggctgccccctcggtcactctgttcccgccctcctctgaggagcttcaagccaacaaggccacactggtgtgtctcataagtgacttctacccgggagccgtgacagtggcctggaaggcagatagcagccccgtcaaggcgggagtggagaccaccacaccctccaaacaaagcaacaacaagtacgcggccagcagctatctgagcctgacgcctgagcagtggaagtcccaca

SEQ ID NO: 1768 - DNA, 561 bp, Human
cagtctgtgctgacgcagccgccctcaatgtctggggccccagggcagagggtcaccatctcctgcactgggagcagctccaacatcggggcaggttatgatgtacactggtaccagcagcttccaggagcagcccccaaactcctcatctatggtgacaccagtcggccctcaggggtccctgaccgattctctggctccaagtctgacacctcagcctccctggccatcactgggctccaggctgaggatgaggctgattattactgccagtcctttgacagaagtctgagtggtctcgtgattttcggcggagggaccaggctgaccgtcctcggtcagcccaaggctgccccctcggtcactctgttcccaccctcctctgaggagcttcaagccaacaaggccacactggtgtgtctcataagtgacttctacccgggagccgtgacagtggcctggaaggcagatagcagccccgtcaaggcgggagtggagaccaccacaccctccaaacaaagcaacaacaagtacgcggccagcagctaagatcggaagagc

SEQ ID NO: 1769 - DNA, 563 bp, Human
gaagttgtgttgacgcagtctccaggcaccctgtctttgtctccaggggaaagagccaccctctcctgcagggccagtcagagtgttagcagcagctacttagcctggtaccagcagaaacctggccaggctcccaggctcgtcatctatggtgcatccagcagggccactggcatcccagacaggttcagtggcagtgggtctgggacagacttcactctcaccatcagcagactggagcctgaagattttgcagtgtattactgtcagcagtttggtagctctcccaccttcggccgagggacacgactggagattaaacgaactgtggctgcaccatctgtcttcatcttcccgccatctgatgagcagttgaaatctggaactgcctctgttgtgtgcctgctgaataacttctatcccagagaggccaaagtacagtggaaggtggataacgccctccaatcgggtaactcccaggagagtgtcacagagcaggacagcaaggacagcacctacagcctcagcagcaccctgacgctgagcaaagcagactacgagaa

SEQ ID NO: 1770 - DNA, 577 bp, Human
cagtctgtgctgactcagccaccctcagcgtctgggacccccgggcagagggtcaccatctcttgttctggaagcagctccaacatcggaagtaatactgtaaactggtaccagcagctcccaggaacggcccccaagctcctcatctatagtaataatcagcggccctcaggggtccctgaccgattctctggctccaagtctggcacctcagcctccctggccatcagtgggctccagtctgaggatgaggctgattattactgtgcagcatgggatgacagcctgaatggtgtggtattcggcggagggaccaagctgaccgtcctaggtcagcccaaggctgccccctcggtcactctgttcccgccctcctctgaggagcttcaagccaacaaggccacactggtgtgtctcataagtgacttctacccgggagccgtgacagtggcctggaaggcagatagcagccccgtcaaggcgggagtggagaccaccacaccctccaaacaaagcaacaacaagtacgcggccagcagctatctgagcctgacgcctgagcagtggaagtcccaca

SEQ ID NO: 1771 - DNA, 563 bp, Human
gacatccagatgacccagtctccttccaccctgtctgcatctgtaggagacagagtcaccatcacttgccgggccagtcagagtattagtagttggttggcctggtatcagcagaaaccagggaaagcccctaagctcctgatctatgatgcctccagtttggaaagtggggtcccatcaaggttcagcggcagtggatctgggacagaattcactctcaccatcagcagcctgcagcctgatgattttgcaacttattactgccaacagtataatatttacccgtacacttttggccaggggaccaagctggacatcaaacgaactgtggctgcaccatctgtcttcatcttcccgccatctgatgagcagttgaaatctggaactgcctctgttgtgtgcctgctgaataacttctatcccagagaggccaaagtacagtggaaggtggataacgccctccaatcgggtaactcccaggagagtgtcacagagcaggacagcaaggacagcacctacagcctcagcagcaccctgacgctgagcaaagcagactacgagaa

SEQ ID NO: 1772 - DNA, 569 bp, Human
gaaattgtgttgacgcagtctccaggcaccctgtctttgtctccaggggaaagagccaccctctcctgcagggccagtcagactgttaccagcaggtacttagcctggtatcagcagaagcctggccaggctcccaggctcctcatctatggtgcatccaccagggccactggcatcccagacaggttcagtggcagtgggtctgggacagacttcactctcaccatcagcagactggagcctgaagattttgcagtgtattactgtcagcagtatggtaattcacctccgtacacttttggccaggggaccaagctggagatcaaacgaactgtggctgcaccatctgtcttcatcttcccgccatctgatgagcagttgaaatctggaactgcctctgttgtgtgcctgctgaataacttctatcccagagaggccaaagtacagtggaaggtggataacgccctccaatcgggtaactcccaggagagtgtcacagagcaggacagcaaggacagcacctacagcctcagcagcaccctgacgctgagcaaagcagactacgagaa

SEQ ID NO: 1773 - DNA, 563 bp, Human
gacatccagatgacccagtctccatcctccctgtctgcatctgtaggagacagagtcaccatcacttgccaggcgagtcaggacattagcaactatttaaattggtatcagcagaaaccagggaaagcccctaagctcctgatctacgatgcatcgaatttggaaacaggggtcccatcaaggttcagtggaagtggatctgggacagattttagttttagtatcagcagcctgcagcctgaagatattgcaacatattactgtcaacagtatgataatgtccctcttactttcggcggagggaccaaggtggagatcaaacgaactgtggctgcaccatctgtcttcatcttcccgccatctgatgagcagttgaaatctggaactgcctctgttgtgtgcctgctgaataacttctatcccagagaggccaaagtacagtggaaggtggataacgccctccaatcgggtaactcccaggagagtgtcacagagcaggacagcaaggacagcacctacagcctcagcagcaccctgacgctgagcaaagcagactacgagaa

SEQ ID NO: 1774 - DNA, 580 bp, Human
gacatcgtgatgacccagtctccagactccctggctgtgtctctgggcgagagggccaccatcaactgcaagtccagccagagtgttttaaacagctccaacaataagaactacttagcttggtaccagcagaaaccaggacagcctcctaagctgctcatttactgggcatctacccgggaatccggggtccctgaccgattcagtggcagcgggtctgggacagatttcactctcaccatcagcagcctgcaggctgaagatgtggcagtttattactgtcagcagtattatagtactcctcagacgttcggccaagggaccaaggtggaaatcaaacgaactgtggctgcaccatctgtcttcatcttcccgccatctgatgagcagttgaaatctggaactgcctctgttgtgtgcctgctgaataacttctatcccagagaggccaaagtacagtggaaggtggataacgccctccaatcgggtaactcccaggagagtgtcacagagcaggacagcaaggacagcacctacagcctcagcagcaccctgacgctgagcaaagcagactacgaga

SEQ ID NO: 1775 - DNA, 581 bp, Human
gacatcgtgatgacccagtctccagactccctggctgtgtctctgggcgagagggccaccatcaactgcaagtccagccagagtgttttatacagctccaacaataagaacttcttaacttggtaccagcagaaaccaggacagcctcctaagctgctcatttactgggcatctacccgggaatccggggtccctgaccgattcagtggcagcgggtctgggacagatttcactctcaccatcagcagcctgcaggctgaagatgtggcagtttattactgtcagcaatattatactactccgtggacgttcggccaagggaccaaggtggaaatcaaacgaactgtggctgcaccatctgtcttcatcttcccgccatctgatgagcagttgaaatctggaactgcctctgttgtgtgcctgctgaataacttctatcccagagaggccaaagtacagtggaaggtggataacgccctccaatcgggtaactcccaggagagtgtcacagagcaggacagcaaggacagcacctacagcctcagcagcaccctgacgctgagcaaagcagactacgagaa

SEQ ID NO: 1776 - DNA, 581 bp, Human
gacatcgtgatgacccagtctccagactccctggctgtgtctctgggcgagagggccaccatcaactgcaactccagccagagtgttttatacagctccatcaataagaactacttagcttggtaccagcagaaaccagcacagcctcctaaggtgctcatttactgggcatctacccgggaatccggggtccctgaccgattcagtggcagcgggtctgggacagatttcactctcaccatcagcagcctgcaggctgaagatgtggcagtttattactgtcagcaatattataggactccctggacgttcggccaagggaccaaggtggaaatcaaacgaactgtggctgcaccatctgtcttcatcttcccgccatctgatgagcagttgaaatctggaactgcctctgttgtgtgcctgctgaataacttctatcccagagaggccaaagtacagtggaaggtggataacgccctccaatcgggtaactcccaggagagtgtcacagagcaggacagcaaggacagcacctacagcctcagcagcaccctgacgctgagcaaagcagactacgagaa

SEQ ID NO: 1777 - DNA, 566 bp, Human
gaaattgtgttgacgcagtctccaggcaccctgtctttgtctccaggggaaagagccaccctctcctgcagggccagtcagagtgttagcagcaactacttagcctggtaccagcagaaacctggccaggctcccaggctcctcatctatggtgcatccagcagggccactggcatcccagagaggttcagtggcagtgggtctgggacagacttcactctcaccatcagcagactggagcctgaagattttgcagtgtattactgtcagcagtatggtaggtcaccgtacacttttggccaggggaccaagctggagatcaaacgaactgtggctgcaccatctgtcttcatcttcccgccatctgatgagcagttgaaatctggaactgcctctgttgtgtgcctgctgaataacttctatcccagagaggccaaagtacagtggaaggtggataacgccctccaatcgggtaactcccaggagagtgtcacagagcaggacagcaaggacagcacttacagcctcagcagcaccctgacgctgagcaaagcagactacgagaa

SEQ ID NO: 1778 - DNA, 580 bp, Human
cagtctgtgctgactcagccaccctcagcgtctgggacccccgggcagagggtcaccatctcttgttctggaagcagctccaacatcggaagtaattatgtatactggtaccagcagctcccaggaacggcccccaaactcctcatctataggaataatcagcggccctcaggggtccctgaccgattctctggctccaagtctggcacctcagcctccctggccatcagtgggctccggtccgaggatgaggctgattattactgtgcagcatgggatgacagcctgagtgttaatgtggtattcggcggagggaccaagctgaccgtcctaggtcagcccaaggctgccccctcggtcactctgttcccgccctcctctgaggagcttcaagccaacaaggccacactggtgtgtctcataagtgacttctacccgggagccgtgacagtggcctggaaggcagatagcagccccgtcaaggcgggagtggagaccaccaaaccctccaaacagagcaacaacaagtacgcggccagcagctacctgagcctgacgcctgagcagtggaagtcccaca

SEQ ID NO: 1779 - DNA, 580 bp, Human
cagtctgccctgactcagcctgcctccgtgtctgggtctcctggacagtcgatcaccatctcctgcactggaaccaacagtgacgttggtggttataactatgtctcctggtaccaacaacacccaggcaaagcccccagactcatgatttatgatgtcagtaatcggccctcaggggtttctaatcgcttctctggctccaagtctggcaacacggcctccctgaccatctctgggctccaggctgaggacgaggctgattattactgcagctcatatacaagcagcagcactctcgtggttttcggcggagggaccaagctgaccgtcctaggtcagcccaaggctgccccctcggtcactctgttcccgccctcctctgaggagcttcaagccaacaaggccacactggtgtgtctcataagtgacttctacccgggagccgtgacagtggcctggaaggcagatagcagccccgtcaaggcgggagtggagaccaccacaccctccaaacaaagcaacaacaagtacgcggccagcagctatctgagcctgacgcctgagcagtggaagtcccaca

SEQ ID NO: 1780 - DNA, 563 bp, Human
gacatccagatgacccagtctccttccaccctgtctgcatctgtaggagacagagtcaccatcacttgccgggccagtcagagtattagtagctggttggcctggtatcagcagaaaccagggaaagcccctaagctcctgatctatgatgcctccagtttggaaagtggggtcccatcaaggttcagcggcagtggatctgggacagaattcactctcaccatcagcagcctgcagcctgatgattttgcaacttattactgccaacagtataatagttatccgtggacgttcggccaagggaccaaggtggaaatcaaacgaactgtggctgcaccatctgtcttcatcttcccgccatctgatgagcagttgaaatctggaactgcctctgttgtgtgcctgctgaataacttctatcccagagaggccaaagtacagtggaaggtggataacgccctccaatcgggtaactcccaggagagtgtcacagagcaggacagcaaggacagcacctacagcctcagcagcaccctgacgctgagcaaagcagactacgagaa

SEQ ID NO: 1781 - DNA, 566 bp, Human
gacatccagatgacccagtctccttccaccctgtctgcatctgtaggagacagagtcaccatcacttgccgggccagtcagagtattagtagctggttggcctggtatcagcagaaaccagggaaagcccctaagctcctgatctatgatgcctccagtttggaaagtggggtcccatcaaggttcagcggcagtggatctgggacagaattcactctcaccgtcagcagcctgcagcctgatgattttgcaacttattactgccaacagtataataattattctcccatcacttttggccaggggaccaagctggagatcaaacgaactgtggctgcaccatctgtcttcatcttcccgccatctgatgagcagttgaaatctggaactgcctctgttgtgtgcctgctgaataacttctatcccagagaggccaaagtacagtggaaggtggataacgccctccaatcgggtaactcccaggagagtgtcacagagcaggacagcaaggacagcacctacagcctcagcagcaccctgacgctgagcaaagcagactacgagaa

SEQ ID NO: 1782 - DNA, 594 bp, Human
cagcctgtgctgactcagccaccttctgcatcagcctccctgggagcctcggtcacactcacctgcaccctgagcagcggctacagtaattataaagtggactggtaccagcagagaccagggaagggcccccagtttgtgatgcgagtgggcactggtgggattgtgggatccaagggggatggcatccctgatcgcttctcagtcttgggctcaggcctgaatcggtacctgaccatcaagaacatccaggaagaggatgagagtgactaccactgtggggcagaccatggcagtgggagcaacttcgttcgggtgttcggcggagggaccaagctgaccgtcctaggtcagcccaaggctgccccctcggtcactctgttcccaccctcctctgaggagcttcaagccaacaaggccacactggtgtgtctcataagtgacttctacccgggagccgtgacagtggcctggaaggcagatagcagccccgtcaaggcgggagtggagaccaccacaccctccaaacaaagcaacaacaagtacgcggccagcagctacctgagcctgacgcctgagcagtggaagtcccac

SEQ ID NO: 1783 - DNA, 563 bp, Human
gacatccagatgacccagtctccttccaccctgtctgcatctgtaggagagagagtcaccatcacttgccgggccagtcagagtattagtaggtggttggcctggtatcagcagaaaccagggaaagcccctaaactccttatctatgatgcctccagtttggaaagtggggtcccatcaaggttcagcggcagtggatctgggacagaattcactctcaccatcagcagcctgcagcctgatgattttgcaacttatcactgccaccagtatagtacttattcgctcactttcggcggagggaccaaggtggacatcaaacgaactgtggctgcaccatctgtcttcatcttcccgccatctgatgagcagttgaaatctggaactgcctctgttgtgtgcctgctgaataacttctatcccagagaggccaaagtacagtggaaggtggataacgccctccaatcgggtaactcccaggagagtgtcacagagcaggacagcaaggacagcacctacagcctcagcagcaccctgacgctgagcaaagcagactacgagaa

SEQ ID NO: 1784 - DNA, 566 bp, Human
gaaattgtgttgacgcagtctccaggcaccctgtctttgtctccaggggaaagagccaccctctcctgcagggccagtcagagtattagcaacagctacttagtctggtaccagcagaaacctggccaggctcccaggctcctcatctatggtgcatccaccagggccactggcatcccagacaggttcagtggcagtgggtctgggacagacttcactctcaccatcagcagactggagcctgaagattttgcagtgtattactgtcagcagtatggtagctcaccgtggacgttcggccaagggaccacggtggaaatcaaacgaactgtggctgcaccatctgtcttcatcttcccgccatctgatgagcagttgaaatctggaactgcctctgttgtgtgcctgctgaataacttctatcccagagaggccaaagtacagtggaaggtggataacgccctccaatcgggtaactcccaggagagtgtcacagagcaggacagcaaggacagcacctacagcctcagcagcaccctgacgctgagcaaagcagactacgagaa

SEQ ID NO: 1785 - DNA, 545 bp, Human
cagtctgtgctgactcagccaccctcagcgtctgggacccccgggcagagggtcaccatctcttgttctggaagcagctccaacatcgaacataattatgtattctggtaccagcaactcccaggaacggcccccaaactcctcatctatagtaataatcaccggccctcaggggtccctgaccgattctctggctccaagtctggcacctcagcctccctggccatcagtgggctccggtccgaggatgaggctgattattactgtgcagcatgggatgccagcctgagtggtcctgtggtattcgccggagggaccaagctgaccgtcctaggtcagcccaaggctgccccctcggtcactctgttcccgccctcctctgaggagcttcaagccaacaaggccacactggtgtgtctcataagtgacttctacccgggagccgtgacagtggcctggaaggcagatagcagccccgtcaaggcgggagtggagaccaccacaccctccaaacaaagcaacaacaagtacgcggccagcagcta

SEQ ID NO: 1786 - DNA, 563 bp, Human
gacatccagatgacccagtctccttccaccctgtctgcatctgtaggagacagagtcaccatcacttgccgggccagtcagagtattactagctggttggcctggtatcagcagaaaccagggaaagcccctaagctcctgatctatgatgcctccaatttggaaagtggggtcccatcaaggttcagcggcagtggatctgggacagaattcactctcaccatcagcagcctgcagcctgatgattttgcaacttattactgccaacagtataataattatctggggacgttcggccaagggaccaaggtggaaatcaaacgaactgtggctgcaccatctgtcttcatcttcccgccatctgatgagcagttgaaatctggaactgcctctgttgtgtgcctgctgaataacttctatcccagagaggccaaagtacagtggaaggtggataacgccctccaatcgggtaactcccaggagagtgtcacagagcaggacagcaaggacagcacctacagcctcagcagcaccctgacgctgagcaaagcagactacgagaa

SEQ ID NO: 1787 - DNA, 581 bp, Human
gacatcgtgatgacccagtctccagactccctgactgtgtctctgggcgagagggccaccatcaactgcaagtccagccagagtgttttatacagctccaacaataagaactacttagcttggtaccagcagaaaccaggacagcctcctaagctgctcatttactgggcatctacccgggaatccggggtccctgaccgattcagtggcagcggctctgggacagatttcactctcaccgtcagcagcctgcaggctgaagatgtggcagtttattactgtcagcaatattatagtactcctggaacgttcggccaagggaccaaggtggaaatcaaacgaactgtggctgcaccatctgtcttcatcttcccgccatctgatgagcagttgaaatctggaactgcctctgttgtgtgcctgctgaataacttctatcccagagaggccaaagtacagtggaaggtggataacgccctccaatcgggtaactcccaggagagtgtcacagagcaggacagcaaggacagcacctacagcctcagcagcaccctgacgctgagcaaagcagactacgagaa

SEQ ID NO: 1788 - DNA, 537 bp, Human
cagtctgccctgactcagcctgcctccgtgtctgggtctcctggacagtcgatcaccatctcctgcactggaaccagcagtgacgttggtgcttataactatgtctcctggtaccaacagcacccaggcaaagcccccaaactcatgatttatgaggtcagtaatcggccctcaggggtttctaatcgcttctctggctccaagtctggcaacacggcctccctgaccatctctgggctccaggctgaggacgaggctgattattactgcagctcatatacaagcagcaccttcttcggaactgggaccacggtcaccgtcctaggtcagcccaaggccaaccccactgtcactctgttcccgccctcctctgaggagctccaagccaacaaggccacactagtgtgtctgatcagtgacttctacccgggagctgtgacagtggcctggaaggcagatggcagccccgtcaaggcgggagtggagaccaccacaccctccaaacaaagcaacaacaagtacgcggccagcagctac

SEQ ID NO: 1789 - DNA, 539 bp, Human
tcctatgtgctgactcagccaccctcagtgtcagtggccccaggaaagacggccaggattacctgtgggggaaacaacattggaagtaaaagtgtgcactggtaccagcagaggccaggccaggcccctgtactggtcatctattatgatagcgaccggccctcagggatccctgagcgattctctggctccaactctgggaacacggccaccctgaccatcagcagggtcgaggccggggatgaggccgactattactgtcaggtgtgggatagtagtagtgatcaccattatgtcttcggaactgggaccaaggtcaccgtcctaggtcagcccaaggccaaccccactgtcactctgttcccgccctcctctgaggagcttcaagccaacaaggccacactggtgtgtctcataagtgacttctacccgggagccgtgacagtggcctggaaggcagatagcagccccgtcaaggcgggagtggagaccaccaaaccctccaaacagagcaacaacaagtacgcggccagcagcta

SEQ ID NO: 1790 - DNA, 544 bp, Human
cagtctgccctgactcagcctccctccgcgtccgggtctcctggacagtcagtcaccatctcctgcactggaaccagcagtgacgttggtggttataactatgtctcctggtaccaacagcacccaggcaaagcccccaaactcatgatttatgaggtcagtaagcggccctcaggggtccctgatcgcttctctggctccaagtctggcaacacggcctccctgaccgtctctgggctccaggctgaggatgaggctgattatttctgcagctcatatgcagacagcaacaatttggtattcggcggagggaccaagctgaccgtcctaggtcagcccaaggctgccccctcggtcactctgttcccgccctcctctgaggagcttcaagccaacaaggccacactggtgtgtctcataagtgacttctgcccgggagccgtgacagtggcctggaaggcagatagcagccccgtcaaggcgggagtggagaccaccacaccctccaaacaaagcaacaacaagtacgcggccagcagctacc

SEQ ID NO: 1791 - DNA, 562 bp, Human
gacatccagatgacccagtctccatcctccctgtctgcatctgtaggagacagagtcaccatcacttgccgggcaagtcagagcattcgcagctatttaaattggtatcagcagaaaccagggaaagcccctaagctcctgatctatgctgcatccagtttgcaaagtggcgtcccatcaaggttcagtggcagtggatctgggacagatttcactctcaccatcggcagtctgcaacctgaagattttgcaacttactactgtcaacagagttacagtacctccgtggcgttcggccaagggaccaaggtggaaatcaaacgaactgtggctgcaccatctgtcttcatcttcccgccatctgatgagcagttgaaatctggaactgcctctgttgtgtgcctgctgaataacttctatcccagagaggccaaagtacagtggaaggtggataacgccctccaatcgggtaactcccaggagagtgtcacagagcaggacagcaaggacagcacctacagcctcagcagcaccctgacgctgagcaaagcagactacgaga

SEQ ID NO: 1792 - DNA, 537 bp, Human; identical to SEQ ID NO: 1788

SEQ ID NO: 1793 - DNA, 542 bp, Human
cagtctgccctgactcaacctccctccgcgtccgggtctcctggacagtcagtcaccatctcctgcactggaaccagcagtgacgttggtggttataactatgtctcctggtaccagcaacacccaggcaaagcccccaaactcatgatttatgaggtcaataagcggccctcaggggtccctgatcgcttctctggctccaagtctggcaacacggcctccctgaccgtctctgggctccaggctgacgatgaggctgattattactgcagctcatatgcaggcagcaacaatttggttttcggcggagggaccaagctgaccgtcctaggtcagcccaaggctgccccctcggtcactctgttcccgccctcctctgaggagcttcaagccaacaaggccacactggtgtgtctcataagtgacttctacccgggagccgtgacagtggcctggaaggcagatagcagccccgtcaaggcgggagtggagaccaccacaccctccaaacaaagcaacaacaagtacgcggccagcagcta

SEQ ID NO: 1794 - DNA, 542 bp, Human
cagtctgccctgactcagcctgcctccgtgtctgggtctcctggacagtcgatcaccatctcctgcactggaaccagcagtgacgttggtggttataactatgtctcctggtaccaacagcacccaggcaaagcccccaaactcatgatttatgaggtcagtaatcggccctcaggggtttctgatcgcttctctggctccaagtctggcaacacggcctccctgaccatctctgggctccaggctgaggacgaggctgattattactgcagctcatatacaagcagcagcacttatgtcttcggaactgggaccaaggtcaccgtcctaggtcagcccaaggccaaccccactgtcactctgttcccgccctcctctgaggagctccaagccaacaaggccacactagtgtgtctgatcagtgacttctacccgggagctgtgacagtggcctggaaggcagatggcagccccgtcaaggcgggagtggagaccaccaaaccctccaaacagagcaacaacaagtacgcggccagcagcta

SEQ ID NO: 1795 - DNA, 566 bp, Human
gacatccagatgacccagtctccatcctccctgtctgcatctgtaggagacagagtcaccatcacttgccaggcgagtcaggacattaacaactatttaaattggtatcagcagaaaccagggaaagcccctaagctcctgatctacgatgcatccaatttggaaacaggggtcccatcaaggttcagtgggagtggatctgggacagattttactttcaccatcagcagcctgcagcctgaagatattgcaacatattactgtcaacagtatgacaatgtccctccgcacacttttggccaggggaccaagctggagatcaaacgaactgtggctgcaccatctgtcttcatcttcccgccatctgatgagcagttgaaatctggaactgcctctgttgtgtgcctgctgaataacttctatcccagagaggccaaagtacagtggaaggtggataacgccctccaatcgggtaactcccaggagagtgtcacagagcaggacagcaaggacagcacctacagcctcagcagcaccctgacgctgagcaaagcagactacgagaa

SEQ ID NO: 1796 - DNA, 579 bp, Human
cagtctgccctgactcagcctccctccgcgtccgggtctcctggacagtcagtcaccatctcctgcactggaaccagcagtgacgttggtggttataactatgtctcctggtaccaacagcacccaggcaaagcccccaaactcatgatttatgaggtcagtaagcggccctcaggggtccctgatcgcttctctggctccaagtctggcaacacggcctccctgaccgtctctgggctccaggctgaggatgaggctgattattactgcagctcatatgcaggcagcaacaatttcggggtattcggcggagggaccaagctgaccgtcctaggtcagcccaaggctgccccctcggtcactctgttcccgccctcctctgaggagcttcaagccaacaaggccacactggtgtgtctcataagtgacttctacccgggagccgtgacagtggcctggaaggcagatagcagccccgtcaaggcgggagtggagaccaccacaccctccaaacaaagcaacaacaagtacgcggccagcagctacctgagcctgacgcctgagcagtggaagtcccac

SEQ ID NO: 1797 - DNA, 545 bp, Human
cagtctgccctgactcagcctgcctccgtgtctgggtctcctggacagtcgatcaccatctcctgcactggaaccagcagtgacattggtggttataactatgtctcctggtaccaacaacacccaggcaaagcccccaaactcatcatttctgatgtctctaatcggccctcaggggtttctagtcgcttctctggctccaagtctggcaacacggcctccctgaccatctctggactccagactgaggacgaggctcattattattgcagctcgtttagaagtggcatcactctcggggtattcggcggggggaccaagctgaccgtcctaggtcagcccaaggctgccccctcggtcactctgttcccgccctcctctgaggagcttcaagccaacaaggccacactggtgtgtctcataagtgacttctacccgggagccgtgacagtggcctggaaggcagatagcagccccgtcaaggcgggagtggagaccaccacaccctccaaacaaagcaacaacaagtacgcggccagcagcta

SEQ ID NO: 1798 - DNA, 576 bp, Human
cagtctgccctgactcagcctccctccgcgtccgggtctcctggacagtcagtcaccatctcctgcactggaaccagcagtgacgttggtggttataactttgtctcctggtaccaacagcacccaggcaaagcccccaaactcatgatttatgaggtcagtaagcggccctcaggggtccctgatcgcttctctggctccaagtctggcaacacggcctccctgaccgtctctgggctccaggctgaggatgaggctgattattactgcagctcatatggaggcagcaacaatttgatattcggcggagggaccaggctgaccgtcctaggtcagcccaaggctgccccctcggtcactctgttcccgccctcctctgaggagcttcaagccaacaaggccacactggtgtgtctcataagtgacttctacccgggagccgtgacagtggcctggaaggcagatagcagccccgtcaaggcgggagtggagaccaccacaccctccaaacaaagcaacaacaagtacgcggccagcagctacctgagcctgacgcctgagcagtggaagtcccac

SEQ ID NO: 1799 - DNA, 459 bp, Human
gacattcagatgacccagtctccatcctccctgtctgcatctataggagacagagtcaccatcacttgccgggcaagtcagagcattagcacctatttaaattggtatcagcagaaaccagggaaagcccctaaactcctgatctatgctgcatccagtttgcaaagtggggtcccatcaaggttcagtggcagtggatctggggcagatttcactctcaccatcagcagtctgcaacctgaagattttgcaacttactactgtcaacagagttacagtaccccgctcactttcggcggagggacgaaggtggagatcaaacgaactgtggctgcaccatctgtcttcatcttcccgccatctgatgagcagttgaaatctggaactgcctctgttgtgtgcctgctgaataacttctatcccagagaggccaaagtacagtggaaggtggataacgcc

SEQ ID NO: 1800 - DNA, 557 bp, Human
cagtctgccctgactcagcctgcctccgtgtctgggtctcctggacagtcgatcaccatctcctgcactggaaccagcagtgacgttggtggttataactatgtctcctggtaccaacaacacccaggcaaagcccccaaactcatgatttatgatgtcagtaatcggccctcaggggtttctaatcgcttctctggctccaagtctggcaacacggcctccctgaccatctctgggctccaggctgaggacgaggctgattattactgcagctcatatgcaagcagcagcacttgggtgttcggcggagggaccaagctgaccgtcctaggtcagcccaaggctgccccctcggtcactctgttcccgccctcctctgaggagcttcaagccaacaaggccacactggtgtgtctcataagtgacttctacccgggagccgtgacagtggcctggaaggcagatagcagccccgtcaaggcgggagtggagaccaccacaccctccaaacaaagcaacaacaagtacgcggccagcagctatctgagcctgacgcc

SEQ ID NO: 1801 - protein, 14 aa, Human
AKGSSTARPYYFDY

SEQ ID NO: 1802 - protein, 8 aa, Human
QEYGSSRM

SEQ ID NO: 1803 - protein, 14 aa, Human
VKGSAAARPYYFDY

SEQ ID NO: 1804 - protein, 8 aa, Human
QQYGNSRI

SEQ ID NO: 1805 - protein, 13 aa, Human
ARGHGNYLTYFDY

SEQ ID NO: 1806 - protein, 13 aa, Human
ARGRGNYFTYFDY

SEQ ID NO: 1807 - protein, 8 aa, Human
QQYGGSLT

SEQ ID NO: 1808 - protein, 13 aa, Human
ARDSIAVAGGLDY

SEQ ID NO: 1809 - protein, 13 aa, Human
ARDGIAVAGGFDY

SEQ ID NO: 1810 - protein, 13 aa, Human
ARDGIAVAGGLDY

SEQ ID NO: 1811 - protein, 10 aa, Human
QAWDSSTSVV

SEQ ID NO: 1812 - protein, 13 aa, Human
ARDSIAVAGGFDY

SEQ ID NO: 1813 - protein, 10 aa, Human
QAWDSSTNVV

SEQ ID NO: 1814 - protein, 14 aa, Human
ARGDGSNSGIYFDS

SEQ ID NO: 1815 - protein, 8 aa, Human
QQYNYWYT

SEQ ID NO: 1816 - protein, 14 aa, Human
ARGGGSSSGLYFES

SEQ ID NO: 1817 - protein, 13 aa, Human
ARLFCGGDCPFDY

SEQ ID NO: 1818 - protein, 9 aa, Human
QQYNTYPRT

SEQ ID NO: 1819 - protein, 13 aa, Human
ARQFCGGDCPFDY

SEQ ID NO: 1820 - protein, 9 aa, Human
QQYNSYPRT

SEQ ID NO: 1821 - protein, 14 aa, Human
ARPNYYGSGSPPGY

SEQ ID NO: 1822 - protein, 8 aa, Human
QQYNSYYT

SEQ ID NO: 1823 - protein, 14 aa, Human
ARPFYYGSESPPGY

SEQ ID NO: 1824 - protein, 10 aa, Human
QLFGSSPTWT

SEQ ID NO: 1825 - protein, 147 aa, Human
QVQLVESGGGVVQPGRSLRLSCAASGFTFSSYGMHWVRQAPGKGLEWVAVISYDGSNKYYADSVKGRFTISRDNSKNTLYLQMNSLRAEDTAVYYCAKGDYYGSGSQYYFDYWGQGTLVTVSSGSASAPTLFPLVSCENSPSDTSSV

SEQ ID NO: 1826 - protein, 123 aa, Human
QVQLVESGGGVVQPGRSLRLSCAASGFTFSSYGMHWVRQAPGKGLEWVAVISYDGSNKYYADSVKGRFTISRDNSKNTLYLQMNSLRAEDTAVYYCAKGDYYGSGSQYYFDYWGQGTLVTVSS

SEQ ID NO: 1827 - protein, 5 aa, Human
SYGMH

SEQ ID NO: 1828 - protein, 17 aa, Human
VISYDGSNKYYADSVKG

SEQ ID NO: 1829 - protein, 14 aa, Human
GDYYGSGSQYYFDY

SEQ ID NO: 1830 - protein, 30 aa, Human; identical to SEQ ID NO: 168

SEQ ID NO: 1831 - protein, 14 aa, Human
WVRQAPGKGLEWVA

SEQ ID NO: 1832 - protein, 32 aa, Human; identical to SEQ ID NO: 692

SEQ ID NO: 1833 - protein, 11 aa, Human
WGQGTLVTVSS

SEQ ID NO: 1834 - protein, 152 aa, Human
DIQMTQSPSTLSASVGDRVTITCRASQSISSWLAWYQQKPGKAPKLLIYDASSLESGVPSRFSGSGSGTEFTLTISSLQPDDFATYYCQQYNSYSQTFGQGTKLEIKRTVAAPSVFIFPPSDEQLKSGTASVVCLLNNFYPREAKVQWKVDN

SEQ ID NO: 1835 - protein, 107 aa, Human
DIQMTQSPSTLSASVGDRVTITCRASQSISSWLAWYQQKPGKAPKLLIYDASSLESGVPSRFSGSGSGTEFTLTISSLQPDDFATYYCQQYNSYSQTFGQGTKLEIK

SEQ ID NO: 1836 - protein, 11 aa, Human
RASQSISSWLA

SEQ ID NO: 1837 - protein, 7 aa, Human
DASSLES

SEQ ID NO: 1838 - protein, 9 aa, Human
QQYNSYSQT

SEQ ID NO: 1839 - protein, 23 aa, Human
DIQMTQSPSTLSASVGDRVTITC

SEQ ID NO: 1840 - protein, 15 aa, Human
WYQQKPGKAPKLLIY

SEQ ID NO: 1841 - protein, 32 aa, Human; identical to SEQ ID NO: 737

SEQ ID NO: 1842 - protein, 10 aa, Human
FGQGTKLEIK

SEQ ID NO: 1843 - protein, 151 aa, Human
EVQLVESGGGLVQPGGSLRLSCAASGFTFSSYWMHWVRQAPGKGLVWVSRINSDGSSTSYADSVKGRFTISRDNAKNTLYLQMNSLRAEDTAVYYCARVVLTYYYDSSGYQNAFDIWGQGTMVTVSSGSASAPTLFPLVSCENSPSDTSSV

SEQ ID NO: 1844 - protein, 127 aa, Human
EVQLVESGGGLVQPGGSLRLSCAASGFTFSSYWMHWVRQAPGKGLVWVSRINSDGSSTSYADSVKGRFTISRDNAKNTLYLQMNSLRAEDTAVYYCARVVLTYYYDSSGYQNAFDIWGQGTMVTVSS

SEQ ID NO: 1845 - protein, 5 aa, Human
SYWMH

SEQ ID NO: 1846 - protein, 17 aa, Human
RINSDGSSTSYADSVKG

SEQ ID NO: 1847 - protein, 18 aa, Human
VVLTYYYDSSGYQNAFDI

SEQ ID NO: 1848 - protein, 30 aa, Human; identical to SEQ ID NO: 870

SEQ ID NO: 1849 - protein, 14 aa, Human
WVRQAPGKGLVWVS

SEQ ID NO: 1850 - protein, 32 aa, Human
RFTISRDNAKNTLYLQMNSLRAEDTAVYYCAR

SEQ ID NO: 1851 - protein, 11 aa, Human
WGQGTMVTVSS

SEQ ID NO: 1852 - protein, 178 aa, Human
SSELTQDPAVSVALGQTVRITCQGDSLRSYYASWYQQKPGQAPVLVIYGKNNRPSGIPDRFSGSSSGNTASLTITGAQAEDEADYYCNSRDSSGNLVVFGGGTKLTVLGQPKAAPSVTLFPPSSEELQANKATLVCLISDFYPGAVTVAWKADSSPVKAGVETTKPSKQSNNKYAASS

SEQ ID NO: 1853 - protein, 108 aa, Human
SSELTQDPAVSVALGQTVRITCQGDSLRSYYASWYQQKPGQAPVLVIYGKNNRPSGIPDRFSGSSSGNTASLTITGAQAEDEADYYCNSRDSSGNLVVFGGGTKLTVL

SEQ ID NO: 1854 - protein, 11 aa, Human
QGDSLRSYYAS

SEQ ID NO: 1855 - protein, 7 aa, Human
GKNNRPS

SEQ ID NO: 1856 - protein, 11 aa, Human
NSRDSSGNLVV

SEQ ID NO: 1857 - protein, 22 aa, Human
SSELTQDPAVSVALGQTVRITC

SEQ ID NO: 1858 - protein, 15 aa, Human
WYQQKPGQAPVLVIY

SEQ ID NO: 1859 - protein, 32 aa, Human
GIPDRFSGSSSGNTASLTITGAQAEDEADYYC

SEQ ID NO: 1860 - protein, 10 aa, Human
FGGGTKLTVL

SEQ ID NO: 1861 - protein, 135 aa, Human
QVQLQESGPGLVKPSETLSLTCTVSGGSISSYYWSWIRQPPGKGLEWIGYIYYSGSTNYNPSLKSRVTISVDTSKNQFSLKLTSVTAADTAVYYCARCALLLGNAFDIWGQGTMVTVSSASTKGPSVFPLAPCSR

SEQ ID NO: 1862 - protein, 119 aa, Human
QVQLQESGPGLVKPSETLSLTCTVSGGSISSYYWSWIRQPPGKGLEWIGYIYYSGSTNYNPSLKSRVTISVDTSKNQFSLKLTSVTAADTAVYYCARCALLLGNAFDIWGQGTMVTVSS

SEQ ID NO: 1863 - protein, 5 aa, Human
SYYWS

SEQ ID NO: 1864 - protein, 16 aa, Human
YIYYSGSTNYNPSLKS

SEQ ID NO: 1865 - protein, 11 aa, Human
CALLLGNAFDI

SEQ ID NO: 1866 - protein, 30 aa, Human; identical to SEQ ID NO: 24

SEQ ID NO: 1867 - protein, 14 aa, Human
WIRQPPGKGLEWIG

SEQ ID NO: 1868 - protein, 32 aa, Human; identical to SEQ ID NO: 422

SEQ ID NO: 1869 - protein, 11 aa, Human
WGQGTMVTVSS

SEQ ID NO: 1870 - protein, 154 aa, Human
DIQMTQSPSSVSASVGDRVTITCRASQGISSWLAWYQQKPGKAPKLLIYAAFSLQSGVPSRFSGSGSGTDFTLTISSLQPEDFATYYCQQANSFPRGLSFGGGTKVEIKRTVAAPSVFIFPPSDEQLKSGTASVVCLLNNFYPREAKVQWKVDN

SEQ ID NO: 1871 - protein, 109 aa, Human
DIQMTQSPSSVSASVGDRVTITCRASQGISSWLAWYQQKPGKAPKLLIYAAFSLQSGVPSRFSGSGSGTDFTLTISSLQPEDFATYYCQQANSFPRGLSFGGGTKVEIK

SEQ ID NO: 1872 - protein, 11 aa, Human
RASQGISSWLA

SEQ ID NO: 1873 - protein, 7 aa, Human
AAFSLQS

SEQ ID NO: 1874 - protein, 11 aa, Human
QQANSFPRGLS

SEQ ID NO: 1875 - protein, 23 aa, Human
DIQMTQSPSSVSASVGDRVTITC

SEQ ID NO: 1876 - protein, 15 aa, Human
WYQQKPGKAPKLLIY

SEQ ID NO: 1877 - protein, 32 aa, Human; identical to SEQ ID NO: 305

SEQ ID NO: 1878 - protein, 10 aa, Human
FGGGTKVEIK

SEQ ID NO: 1879 - protein, 145 aa, Human
EVHLLESGGGLVQPGGSLRLSCAASGFTFSSYAMSWVRQTPGKGLEWISAITASGSDTFHADSVKGRFTISRDNSKDTLYLQMNSLRVEDTAIYYCAKGSSTARPYYFDYWGQGTLVTVSSGSASAPTLFPLVSCENSPSDTSSV

SEQ ID NO: 1880 - protein, 121 aa, Human
EVHLLESGGGLVQPGGSLRLSCAASGFTFSSYAMSWVRQTPGKGLEWISAITASGSDTFHADSVKGRFTISRDNSKDTLYLQMNSLRVEDTAIYYCAKGSSTARPYYFDYWGQGTLVTVSS

SEQ ID NO: 1881 - protein, 5 aa, Human
SYAMS

SEQ ID NO: 1882 - protein, 17 aa, Human
AITASGSDTFHADSVKG

SEQ ID NO: 1883 - protein, 12 aa, Human
GSSTARPYYFDY

SEQ ID NO: 1884 - protein, 30 aa, Human
EVHLLESGGGLVQPGGSLRLSCAASGFTFS

SEQ ID NO: 1885 - protein, 14 aa, Human
WVRQTPGKGLEWIS

SEQ ID NO: 1886 - protein, 32 aa, Human
RFTISRDNSKDTLYLQMNSLRVEDTAIYYCAK

SEQ ID NO: 1887 - protein, 11 aa, Human
WGQGTLVTVSS

SEQ ID NO: 1888 - protein, 187 aa, Human
EIVLTQSPGTLSLSPGERATLSCRASQSVSSSHLAWYQQKPGQSPRLLIYGTSNRATGIPDRFSGSGSGTDFTLSISRLEPEDFAVYYCQEYGSSRMFGQGTKVEIKRTVAAPSVFIFPPSDEQLKSGTASVVCLLNNFYPREAKVQWKVDNALQSGNSQESVTEQDSKDSTYSLSSTLTLSKADYE

SEQ ID NO: 1889 - protein, 107 aa, Human
EIVLTQSPGTLSLSPGERATLSCRASQSVSSSHLAWYQQKPGQSPRLLIYGTSNRATGIPDRFSGSGSGTDFTLSISRLEPEDFAVYYCQEYGSSRMFGQGTKVEIK

SEQ ID NO: 1890 - protein, 12 aa, Human
RASQSVSSSHLA

SEQ ID NO: 1891 - protein, 7 aa, Human
GTSNRAT

SEQ ID NO: 1892 - protein, 8 aa, Human
QEYGSSRM

SEQ ID NO: 1893 - protein, 23 aa, Human
EIVLTQSPGTLSLSPGERATLSC

SEQ ID NO: 1894 - protein, 15 aa, Human
WYQQKPGQSPRLLIY

SEQ ID NO: 1895 - protein, 32 aa, Human
GIPDRFSGSGSGTDFTLSISRLEPEDFAVYYC

SEQ ID NO: 1896 - protein, 10 aa, Human
FGQGTKVEIK

SEQ ID NO: 1897 - protein, 148 aa, Human
EVQLVQSGAEMKKPGESLKISCKASGYYFPSYWIAWVRQMPGRGLEWMGIIYPVDSETTYSPSFQGHVTISADKSISTAYLQWSSLKASDTAMYYCARPNYYGSGSPPGYWGQGTLVTVSSGSASAPTLFPLVSCENSPSDTSSVAVG

SEQ ID NO: 1898 - protein, 121 aa, Human
EVQLVQSGAEMKKPGESLKISCKASGYYFPSYWIAWVRQMPGRGLEWMGIIYPVDSETTYSPSFQGHVTISADKSISTAYLQWSSLKASDTAMYYCARPNYYGSGSPPGYWGQGTLVTVSS

SEQ ID NO: 1899 - protein, 5 aa, Human
SYWIA

SEQ ID NO: 1900 - protein, 17 aa, Human
IIYPVDSETTYSPSFQG

SEQ ID NO: 1901 - protein, 12 aa, Human
PNYYGSGSPPGY

SEQ ID NO: 1902 - protein, 30 aa, Human
EVQLVQSGAEMKKPGESLKISCKASGYYFP

SEQ ID NO: 1903 - protein, 14 aa, Human
WVRQMPGRGLEWMG

SEQ ID NO: 1904 - protein, 32 aa, Human; identical to SEQ ID NO: 206

SEQ ID NO: 1905 - protein, 11 aa, Human
WGQGTLVTVSS

SEQ ID NO: 1906 - protein, 188 aa, Human
EIVLTQSPGTLSLSPGERATLSCRASQGVSSNYLAWYQQKPGQAPRLLIYGASSRATGIPDRFSGSGSGTDFTLTISRLEPEDFAVYYCQQYGTTPNTFGGGTKVEIKRTVAAPSVFIFPPSDEQLKSGTASVVCLLNNFYPREAKVQWKVDNALQSGNSQESVTEQDSKDSTYSLSSTLTLSKADYE

SEQ ID NO: 1907 - protein, 108 aa, Human
EIVLTQSPGTLSLSPGERATLSCRASQGVSSNYLAWYQQKPGQAPRLLIYGASSRATGIPDRFSGSGSGTDFTLTISRLEPEDFAVYYCQQYGTTPNTFGGGTKVEIK

SEQ ID NO: 1908 - protein, 12 aa, Human
RASQGVSSNYLA

SEQ ID NO: 1909 - protein, 7 aa, Human
GASSRAT

SEQ ID NO: 1910 - protein, 9 aa, Human
QQYGTTPNT

SEQ ID NO: 1911 - protein, 23 aa, Human
EIVLTQSPGTLSLSPGERATLSC

SEQ ID NO: 1912 - protein, 15 aa, Human
WYQQKPGQAPRLLIY

SEQ ID NO: 1913 - protein, 32 aa, Human; identical to SEQ ID NO: 233

SEQ ID NO: 1914 - protein, 10 aa, Human
FGGGTKVEIK

SEQ ID NO: 1915 - protein, 181 aa, Human
EVQLVQSGAEVKKPGESLKISCKGSGYTFTNYWIGWVRQMPGKGLEWMGIIYPGDSDTRYSPSFQGQVTISADKSISTAYLQWSSLKASDTAMYYCARLFCGGDCPFDYWGQGTLVTVSSASTKGPSVFPLAPCSRSTSGGTAALGCLVKDYFPEPVTVSWNSGALTSGVHTFPAVLQSSG

SEQ ID NO: 1916 - protein, 120 aa, Human
EVQLVQSGAEVKKPGESLKISCKGSGYTFTNYWIGWVRQMPGKGLEWMGIIYPGDSDTRYSPSFQGQVTISADKSISTAYLQWSSLKASDTAMYYCARLFCGGDCPFDYWGQGTLVTVSS

SEQ ID NO: 1917 - protein, 5 aa, Human
NYWIG

SEQ ID NO: 1918 - protein, 17 aa, Human
IIYPGDSDTRYSPSFQG

SEQ ID NO: 1919 - protein, 11 aa, Human
LFCGGDCPFDY

SEQ ID NO: 1920 - protein, 30 aa, Human; identical to SEQ ID NO: 1302

SEQ ID NO: 1921 - protein, 14 aa, Human
WVRQMPGKGLEWMG

SEQ ID NO: 1922 - protein, 32 aa, Human; identical to SEQ ID NO: 944

SEQ ID NO: 1923 - protein, 11 aa, Human
WGQGTLVTVSS

SEQ ID NO: 1924 - protein, 187 aa, Human
DIQMTQSPSTLSASVGDRVTITCRASQSISSWLAWYQQKPGKAPNLLIYDASSLESGVPSRFSGSGSGTEFTLTISSLQPDDFATYYCQQYNTYPRTFGQGTKVEIKRTVAAPSVFIFPPSDEQLKSGTASVVCLLNNFYPREAKVQWKVDNALQSGNSQESVTEQDSKDSTYSLSSTLTLSKADYE

SEQ ID NO: 1925 - protein, 107 aa, Human
DIQMTQSPSTLSASVGDRVTITCRASQSISSWLAWYQQKPGKAPNLLIYDASSLESGVPSRFSGSGSGTEFTLTISSLQPDDFATYYCQQYNTYPRTFGQGTKVEIK

SEQ ID NO: 1926 - protein, 11 aa, Human
RASQSISSWLA

SEQ ID NO: 1927 - protein, 7 aa, Human
DASSLES

SEQ ID NO: 1928 - protein, 9 aa, Human
QQYNTYPRT

SEQ ID NO: 1929 - protein, 23 aa, Human
DIQMTQSPSTLSASVGDRVTITC

SEQ ID NO: 1930 - protein, 15 aa, Human
WYQQKPGKAPNLLIY

SEQ ID NO: 1931 - protein, 32 aa, Human; identical to SEQ ID NO: 737

SEQ ID NO: 1932 - protein, 10 aa, Human
FGQGTKVEIK

SEQ ID NO: 1933 - protein, 145 aa, Human
EVQLLESGGGLVQPGGSLRLSCAASGFSFSNYAMSWVRQAPGKGLEWVSAVSGNGVGTFHADSVKGRFTISRDNSKDTFYLQMSGLTVDDTALYYCVKGSAAARPYYFDYWGQGILVAVSSGSASAPTLFPLVSCENSPSDTSSV

SEQ ID NO: 1934 - protein, 121 aa, Human
EVQLLESGGGLVQPGGSLRLSCAASGFSFSNYAMSWVRQAPGKGLEWVSAVSGNGVGTFHADSVKGRFTISRDNSKDTFYLQMSGLTVDDTALYYCVKGSAAARPYYFDYWGQGILVAVSS

SEQ ID NO: 1935 - protein, 5 aa, Human
NYAMS

SEQ ID NO: 1936 - protein, 17 aa, Human
AVSGNGVGTFHADSVKG

SEQ ID NO: 1937 - protein, 12 aa, Human
GSAAARPYYFDY

SEQ ID NO: 1938 - protein, 30 aa, Human
EVQLLESGGGLVQPGGSLRLSCAASGFSFS

SEQ ID NO: 1939 - protein, 14 aa, Human
WVRQAPGKGLEWVS

SEQ ID NO: 1940 - protein, 32 aa, Human
RFTISRDNSKDTFYLQMSGLTVDDTALYYCVK

SEQ ID NO: 1941 - protein, 11 aa, Human
WGQGILVAVSS

SEQ ID NO: 1942 - protein, 152 aa, Human
EIVLTQSPGTLSLSPGERATLSCRASQTVSSNYLAWYQQKPAQGPRLVIYGASNRATGIPDRFSGSGSGTDFTLTISRLEPEDFAVYYCQQYGNSRIFGQGTKVEIKRTVAAPSVFIFPPSDEQLKSGTASVVCLLNNFYPREAKVQWKVDN

SEQ ID NO: 1943 - protein, 107 aa, Human
EIVLTQSPGTLSLSPGERATLSCRASQTVSSNYLAWYQQKPAQGPRLVIYGASNRATGIPDRFSGSGSGTDFTLTISRLEPEDFAVYYCQQYGNSRIFGQGTKVEIK

SEQ ID NO: 1944 - protein, 12 aa, Human
RASQTVSSNYLA

SEQ ID NO: 1945 - protein, 7 aa, Human
GASNRAT

SEQ ID NO: 1946 - protein, 8 aa, Human
QQYGNSRI

SEQ ID NO: 1947 - protein, 23 aa, Human
EIVLTQSPGTLSLSPGERATLSC

SEQ ID NO: 1948 - protein, 15 aa, Human
WYQQKPAQGPRLVIY

SEQ ID NO: 1949 - protein, 32 aa, Human; identical to SEQ ID NO: 233

SEQ ID NO: 1950 - protein, 10 aa, Human
FGQGTKVEIK

SEQ ID NO: 1951 - protein, 144 aa, Human
EVQLVESGGGLVQPGGSLRLSCAASGFTFTIYWMSWVRQAPGKGLEWVANIKQDGSEKYYVDSVKGRFTISRDNAKNSLYLQMNSLRAEDTAVYYCARDGIAVAGGFDYWGQGTLVTVSSGSASAPTLFPLVSCENSPSDTSSV

SEQ ID NO: 1952 - protein, 120 aa, Human
EVQLVESGGGLVQPGGSLRLSCAASGFTFTIYWMSWVRQAPGKGLEWVANIKQDGSEKYYVDSVKGRFTISRDNAKNSLYLQMNSLRAEDTAVYYCARDGIAVAGGFDYWGQGTLVTVSS

SEQ ID NO: 1953 - protein, 5 aa, Human
IYWMS

SEQ ID NO: 1954 - protein, 17 aa, Human
NIKQDGSEKYYVDSVKG

SEQ ID NO: 1955 - protein, 11 aa, Human
DGIAVAGGFDY

SEQ ID NO: 1956 - protein, 30 aa, Human
EVQLVESGGGLVQPGGSLRLSCAASGFTFT

SEQ ID NO: 1957 - protein, 14 aa, Human
WVRQAPGKGLEWVA

SEQ ID NO: 1958 - protein, 32 aa, Human; identical to SEQ ID NO: 332

SEQ ID NO: 1959 - protein, 11 aa, Human
WGQGTLVTVSS

SEQ ID NO: 1960 - protein, 176 aa, Human
SYELTQPPSVSVSPGQTASITCSGDKLGDKYACWYQQKPGQSPVLVIYQDSKRPSGIPERFSGSNSGNTATLTISGTQAMDEADYYCQAWDSSTVVFGGGTKLTVLGQPKAAPSVTLFPPSSEELQANKATLVCLISDFYPGAVTVAWKADSSPVKAGVETTTPSKQSNNKYAASS

SEQ ID NO: 1961 - protein, 106 aa, Human; identical to SEQ ID NO: 695

SEQ ID NO: 1962 - protein, 11 aa, Human
SGDKLGDKYAC

SEQ ID NO: 1963 - protein, 7 aa, Human
QDSKRPS

SEQ ID NO: 1964 - protein, 9 aa, Human
QAWDSSTVV

SEQ ID NO: 1965 - protein, 22 aa, Human
SYELTQPPSVSVSPGQTASITC

SEQ ID NO: 1966 - protein, 15 aa, Human
WYQQKPGQSPVLVIY

SEQ ID NO: 1967 - protein, 32 aa, Human; identical to SEQ ID NO: 467

SEQ ID NO: 1968 - protein, 10 aa, Human
FGGGTKLTVL

SEQ ID NO: 1969 - protein, 143 aa, Human
QITLKESGPTLVKPTQTLTLTCTFSGFSLSTSGVGVGWIRQPPGKALEWLALIYWDDDKRYRPSLKSRLSITKDTSKNQVVLTMTNMDPVDTATYYCAHHHPILDFDYWGQGTLVTVSSGSASAPTLFPLVSCENSPSDTSSV

SEQ ID NO: 1970 - protein, 119 aa, Human
QITLKESGPTLVKPTQTLTLTCTFSGFSLSTSGVGVGWIRQPPGKALEWLALIYWDDDKRYRPSLKSRLSITKDTSKNQVVLTMTNMDPVDTATYYCAHHHPILDFDYWGQGTLVTVSS

SEQ ID NO: 1971 - protein, 7 aa, Human
TSGVGVG

SEQ ID NO: 1972 - protein, 16 aa, Human
LIYWDDDKRYRPSLKS

SEQ ID NO: 1973 - protein, 9 aa, Human
HHPILDFDY

SEQ ID NO: 1974 - protein, 30 aa, Human
QITLKESGPTLVKPTQTLTLTCTFSGFSLS

SEQ ID NO: 1975 - protein, 14 aa, Human
WIRQPPGKALEWLA

SEQ ID NO: 1976 - protein, 32 aa, Human
RLSITKDTSKNQVVLTMTNMDPVDTATYYCAH

SEQ ID NO: 1977 - protein, 11 aa, Human
WGQGTLVTVSS

SEQ ID NO: 1978 - protein, 178 aa, Human
SYELTQPPSVSVSPGQTASITCSGDKLGDKYACWYQQKPGQSPVLVIYQDSKRPSGIPERFSGSNSGNTATLTISGTQAMDEADYYCQAWDSSTRDYVFGTGTKVTVLGQPKANPTVTLFPPSSEELQANKATLVCLISDFYPGAVTVAWKADGSPVKAGVETTKPSKQSNNKYAASS

SEQ ID NO: 1979 - protein, 108 aa, Human
SYELTQPPSVSVSPGQTASITCSGDKLGDKYACWYQQKPGQSPVLVIYQDSKRPSGIPERFSGSNSGNTATLTISGTQAMDEADYYCQAWDSSTRDYVFGTGTKVTVL

SEQ ID NO: 1980 - protein, 11 aa, Human
SGDKLGDKYAC

SEQ ID NO: 1981 - protein, 7 aa, Human
QDSKRPS

SEQ ID NO: 1982 - protein, 11 aa, Human
QAWDSSTRDYV

SEQ ID NO: 1983 - protein, 22 aa, Human
SYELTQPPSVSVSPGQTASITC

SEQ ID NO: 1984 - protein, 15 aa, Human
WYQQKPGQSPVLVIY

SEQ ID NO: 1985 - protein, 32 aa, Human; identical to SEQ ID NO: 467

SEQ ID NO: 1986 - protein, 10 aa, Human
FGTGTKVTVL

SEQ ID NO: 1987 - protein, 156 aa, Human
QVQLQESGPGLVKPSETLSLTCTVSGGSISTYYWSWIRQPAGKGLEWIGRIYTSGSTNYNPSLKSRVTMSVDTSKNQFSLKLSSVTAADTAVYYCAREVTMIVLGYNWFDPWGQGTLVTVSSAPTKAPDVFPIISGCRHPKDNSPVVLACLITGYH

SEQ ID NO: 1988 - protein, 122 aa, Human
QVQLQESGPGLVKPSETLSLTCTVSGGSISTYYWSWIRQPAGKGLEWIGRIYTSGSTNYNPSLKSRVTMSVDTSKNQFSLKLSSVTAADTAVYYCAREVTMIVLGYNWFDPWGQGTLVTVSS

SEQ ID NO: 1989 - protein, 5 aa, Human
TYYWS

SEQ ID NO: 1990 - protein, 16 aa, Human
RIYTSGSTNYNPSLKS

SEQ ID NO: 1991 - protein, 14 aa, Human
EVTMIVLGYNWFDP

SEQ ID NO: 1992 - protein, 30 aa, Human; identical to SEQ ID NO: 24

SEQ ID NO: 1993 - protein, 14 aa, Human
WIRQPAGKGLEWIG

SEQ ID NO: 1994 - protein, 32 aa, Human; identical to SEQ ID NO: 62

SEQ ID NO: 1995 - protein, 11 aa, Human
WGQGTLVTVSS

SEQ ID NO: 1996 - protein, 179 aa, Human
SYVLTQTPSVSVAPGQTARITCGGNNIGSKSVHWYQQKPGQAPVLVVHDESDRPSGIPERFFGSNSGNTATLTISRVEAGDEADYYCQVWDSSSDHLHVFGTGTKVTVLGQPKANPTVTLFPPSSEELQANKATLVCLISDFYPGAVTVAWKADGSPVKAGVETTKPSKQSNNKYAASS

SEQ ID NO: 1997 - protein, 109 aa, Human
SYVLTQTPSVSVAPGQTARITCGGNNIGSKSVHWYQQKPGQAPVLVVHDESDRPSGIPERFFGSNSGNTATLTISRVEAGDEADYYCQVWDSSSDHLHVFGTGTKVTVL

SEQ ID NO: 1998 - protein, 11 aa, Human
GGNNIGSKSVH

SEQ ID NO: 1999 - protein, 7 aa, Human
DESDRPS

SEQ ID NO: 2000 - protein, 12 aa, Human
QVWDSSSDHLHV

SEQ ID NO: 2001 - protein, 22 aa, Human
SYVLTQTPSVSVAPGQTARITC

SEQ ID NO: 2002 - protein, 15 aa, Human
WYQQKPGQAPVLVVH

SEQ ID NO: 2003 - protein, 32 aa, Human
GIPERFFGSNSGNTATLTISRVEAGDEADYYC

SEQ ID NO: 2004 - protein, 10 aa, Human
FGTGTKVTVL

SEQ ID NO: 2005 - protein, 144 aa, Human
EVQLVESGGGLVQPGGSLRLSCAASGFTFSSYWMSWVRQAPGKGLEWVANIKQDGSEKYYVASVKGRFTISRDNAKNSLYLQMNSLRAEDTAVYYCARDSIAVAGGLDYWGQGTLVTVSSGSASAPTLFPLVSCENSPSDTSSV

SEQ ID NO: 2006 - protein, 120 aa, Human
EVQLVESGGGLVQPGGSLRLSCAASGFTFSSYWMSWVRQAPGKGLEWVANIKQDGSEKYYVASVKGRFTISRDNAKNSLYLQMNSLRAEDTAVYYCARDSIAVAGGLDYWGQGTLVTVSS

SEQ ID NO: 2007 - protein, 5 aa, Human
SYWMS

SEQ ID NO: 2008 - protein, 17 aa, Human
NIKQDGSEKYYVASVKG

SEQ ID NO: 2009 - protein, 11 aa, Human
DSIAVAGGLDY

SEQ ID NO: 2010 - protein, 30 aa, Human; identical to SEQ ID NO: 870

SEQ ID NO: 2011 - protein, 14 aa, Human
WVRQAPGKGLEWVA

SEQ ID NO: 2012 - protein, 32 aa, Human; identical to SEQ ID NO: 332

SEQ ID NO: 2013 - protein, 11 aa, Human
WGQGTLVTVSS

SEQ ID NO: 2014 - protein, 176 aa, Human
SYELTQPPSVSVSPGQTASITCSGDKLGDKYACWYQQKPGQSPVLVIYQDSKRPSGIPERFSGSNSGNTATLTISGTQAMDEADYFCQAWDSSTVVFGGGTKLTVLRQPKAAPSVTLFPPSSEELQANKATLVCLISDFYPGAVTVAWKADSSPVKAGVETTTPSKQSNNKYAASS

SEQ ID NO: 2015 - protein, 106 aa, Human
SYELTQPPSVSVSPGQTASITCSGDKLGDKYACWYQQKPGQSPVLVIYQDSKRPSGIPERFSGSNSGNTATLTISGTQAMDEADYFCQAWDSSTVVFGGGTKLTVL

SEQ ID NO: 2016 - protein, 11 aa, Human
SGDKLGDKYAC

SEQ ID NO: 2017 - protein, 7 aa, Human
QDSKRPS

SEQ ID NO: 2018 - protein, 9 aa, Human
QAWDSSTVV

SEQ ID NO: 2019 - protein, 22 aa, Human
SYELTQPPSVSVSPGQTASITC

SEQ ID NO: 2020 - protein, 15 aa, Human
WYQQKPGQSPVLVIY

SEQ ID NO: 2021 - protein, 32 aa, Human
GIPERFSGSNSGNTATLTISGTQAMDEADYFC

SEQ ID NO: 2022 - protein, 10 aa, Human
FGGGTKLTVL

SEQ ID NO: 2023 - protein, 187 aa, Human
QVQLVESGGGLVKPGGSLRLSCAASGFTFSDYYMSWIRQAPGKGLEWVSYISISDTTIYYADAVQGRFTMSRDNAKNSLYLQMNSLKAEDTAVYYCARASPYCGGDCSFGNAFDIWGLGTMVTVSSASTKGPSVFPLAPSSKSTSGGTAALGCLVKDYFPEPVTVSWNSGALTSGVHTFPAVLQSSG

SEQ ID NO: 2024 - protein, 126 aa, Human
QVQLVESGGGLVKPGGSLRLSCAASGFTFSDYYMSWIRQAPGKGLEWVSYISISDTTIYYADAVQGRFTMSRDNAKNSLYLQMNSLKAEDTAVYYCARASPYCGGDCSFGNAFDIWGLGTMVTVSS

SEQ ID NO: 2025 - protein, 5 aa, Human
DYYMS

SEQ ID NO: 2026 - protein, 17 aa, Human
YISISDTTIYYADAVQG

SEQ ID NO: 2027 - protein, 17 aa, Human
ASPYCGGDCSFGNAFDI

SEQ ID NO: 2028 - protein, 30 aa, Human
QVQLVESGGGLVKPGGSLRLSCAASGFTFS

SEQ ID NO: 2029 - protein, 14 aa, Human
WIRQAPGKGLEWVS

SEQ ID NO: 2030 - protein, 32 aa, Human
RFTMSRDNAKNSLYLQMNSLKAEDTAVYYCAR

SEQ ID NO: 2031 - protein, 11 aa, Human
WGLGTMVTVSS

SEQ ID NO: 2032 - protein, 186 aa, Human
DIQMTQSPSTLSASVGDRVTITCRASQSIFSWLAWYQQKPGKAPKLLIYDASSLESGVPSRFSGSGSGTEFTLTISSLQPDDFATYYCQQYNSYWTFGQGTKVEIKRTVAAPSVFIFPPSDEQLKSGTASVVCLLNNFYPREAKVQWKVDNALQSGNSQESVTEQDSKDSTYSLSSTLTLSKADYE

SEQ ID NO: 2033 - protein, 106 aa, Human
DIQMTQSPSTLSASVGDRVTITCRASQSIFSWLAWYQQKPGKAPKLLIYDASSLESGVPSRFSGSGSGTEFTLTISSLQPDDFATYYCQQYNSYWTFGQGTKVEIK

SEQ ID NO: 2034 - protein, 11 aa, Human
RASQSIFSWLA

SEQ ID NO: 2035 - protein, 7 aa, Human
DASSLES

SEQ ID NO: 2036 - protein, 8 aa, Human
QQYNSYWT

SEQ ID NO: 2037 - protein, 23 aa, Human
DIQMTQSPSTLSASVGDRVTITC

SEQ ID NO: 2038 - protein, 15 aa, Human
WYQQKPGKAPKLLIY

SEQ ID NO: 2039 - protein, 32 aa, Human; identical to SEQ ID NO: 737

SEQ ID NO: 2040 - protein, 10 aa, Human
FGQGTKVEIK

SEQ ID NO: 2041 - protein, 154 aa, Human
EVQLVESGGGLVQPGGSLRLSCAASGFTFSSYWMSWVRQAPGKGLEWVANIKQDGSEKYYVDSVKGRFTISRDNAKNSLYLQMNSLRAEDTAVYYCARDGIAVAGGLDYWGQGTLVTVSSAPTKAPDVFPIISGCRHPKDNSPVVLACLITGYH

SEQ ID NO: 2042 - protein, 120 aa, Human
EVQLVESGGGLVQPGGSLRLSCAASGFTFSSYWMSWVRQAPGKGLEWVANIKQDGSEKYYVDSVKGRFTISRDNAKNSLYLQMNSLRAEDTAVYYCARDGIAVAGGLDYWGQGTLVTVSS

SEQ ID NO: 2043 - protein, 5 aa, Human
SYWMS

SEQ ID NO: 2044 - protein, 17 aa, Human
NIKQDGSEKYYVDSVKG

SEQ ID NO: 2045 - protein, 11 aa, Human
DGIAVAGGLDY

SEQ ID NO: 2046 - protein, 30 aa, Human; identical to SEQ ID NO: 870

SEQ ID NO: 2047 - protein, 14 aa, Human
WVRQAPGKGLEWVA

SEQ ID NO: 2048 - protein, 32 aa, Human; identical to SEQ ID NO: 332

SEQ ID NO: 2049 - protein, 11 aa, Human
WGQGTLVTVSS

SEQ ID NO: 2050 - protein, 176 aa, Human; identical to SEQ ID NO: 1960

SEQ ID NO: 2051 - protein, 106 aa, Human; identical to SEQ ID NO: 695

SEQ ID NO: 2052 - protein, 11 aa, Human
SGDKLGDKYAC

SEQ ID NO: 2053 - protein, 7 aa, Human
QDSKRPS

SEQ ID NO: 2054 - protein, 9 aa, Human
QAWDSSTVV

SEQ ID NO: 2055 - protein, 22 aa, Human
SYELTQPPSVSVSPGQTASITC

SEQ ID NO: 2056 - protein, 15 aa, Human
WYQQKPGQSPVLVIY

SEQ ID NO: 2057 - protein, 32 aa, Human; identical to SEQ ID NO: 467

SEQ ID NO: 2058 - protein, 10 aa, Human
FGGGTKLTVL

SEQ ID NO: 2059 - protein, 182 aa, Human
QVQLVESGGGVVQPGRSLRLSCAASGFIFSNNALHWVRQAPGKGLEWVAIISYDGSNKNYAASVKGRFTISRDNSQNTVFLQMNSLRAEDTAVYYCARDHIAGAAKYFDYWGQGTLVTVSSASTKGPSVFPLAPSSKSTSGGTAALGCLVKDYFPEPVTVSWNSGALTSGVHTFPAVLQSSG

SEQ ID NO: 2060 - protein, 121 aa, Human
QVQLVESGGGVVQPGRSLRLSCAASGFIFSNNALHWVRQAPGKGLEWVAIISYDGSNKNYAASVKGRFTISRDNSQNTVFLQMNSLRAEDTAVYYCARDHIAGAAKYFDYWGQGTLVTVSS

SEQ ID NO: 2061 - protein, 5 aa, Human
NNALH

SEQ ID NO: 2062 - protein, 17 aa, Human
IISYDGSNKNYAASVKG

SEQ ID NO: 2063 - protein, 12 aa, Human
DHIAGAAKYFDY

SEQ ID NO: 2064 - protein, 30 aa, Human
QVQLVESGGGVVQPGRSLRLSCAASGFIFS

SEQ ID NO: 2065 - protein, 14 aa, Human
WVRQAPGKGLEWVA

SEQ ID NO: 2066 - protein, 32 aa, Human
RFTISRDNSQNTVFLQMNSLRAEDTAVYYCAR

SEQ ID NO: 2067 - protein, 11 aa, Human
WGQGTLVTVSS

SEQ ID NO: 2068 - protein, 177 aa, Human
SYELTQPPSVSVSPGQTARITCSGDALPKKFVHWYQQKSGQAPVLVIYEDSKRPSGIPERFSGSSSGTTATLTISGAQVEDEGDYYCYSTDSSGRGVFGGGTKLTVLGQPKAAPSVTLFPPSSEELQANKATLVCLISDFYPGAVTVAWKADSSPVKAGVETTTPSKQSNNKYAASS

SEQ ID NO: 2069 - protein, 107 aa, Human
SYELTQPPSVSVSPGQTARITCSGDALPKKFVHWYQQKSGQAPVLVIYEDSKRPSGIPERFSGSSSGTTATLTISGAQVEDEGDYYCYSTDSSGRGVFGGGTKLTVL

SEQ ID NO: 2070 - protein, 11 aa, Human
SGDALPKKFVH

SEQ ID NO: 2071 - protein, 7 aa, Human
EDSKRPS

SEQ ID NO: 2072 - protein, 10 aa, Human
YSTDSSGRGV

SEQ ID NO: 2073 - protein, 22 aa, Human
SYELTQPPSVSVSPGQTARITC

SEQ ID NO: 2074 - protein, 15 aa, Human
WYQQKSGQAPVLVIY

SEQ ID NO: 2075 - protein, 32 aa, Human
GIPERFSGSSSGTTATLTISGAQVEDEGDYYC

SEQ ID NO: 2076 - protein, 10 aa, Human
FGGGTKLTVL

SEQ ID NO: 2077 - protein, 162 aa, Human
QVQLQESGPGLVKPSQTLSLTCTVSGGSISSGSYYWSWIRQPAGKGLEWIGRIYTSGSTNYNPSLKSRVTISVDTSKNQFSLKLSSVTAADTAVYYCARESKVTMVRGGLAYYYMDVWGKGTTVTVSSAPTKAPDVFPIISGCRHPKDNSPVVLACLITGYH

SEQ ID NO: 2078 - protein, 128 aa, Human
QVQLQESGPGLVKPSQTLSLTCTVSGGSISSGSYYWSWIRQPAGKGLEWIGRIYTSGSTNYNPSLKSRVTISVDTSKNQFSLKLSSVTAADTAVYYCARESKVTMVRGGLAYYYMDVWGKGTTVTVSS

SEQ ID NO: 2079 - protein, 7 aa, Human
SGSYYWS

SEQ ID NO: 2080 - protein, 16 aa, Human
RIYTSGSTNYNPSLKS

SEQ ID NO: 2081 - protein, 18 aa, Human
ESKVTMVRGGLAYYYMDV

SEQ ID NO: 2082 - protein, 30 aa, Human
QVQLQESGPGLVKPSQTLSLTCTVSGGSIS

SEQ ID NO: 2083 - protein, 14 aa, Human
WIRQPAGKGLEWIG

SEQ ID NO: 2084 - protein, 32 aa, Human; identical to SEQ ID NO: 134

SEQ ID NO: 2085 - protein, 11 aa, Human
WGKGTTVTVSS

SEQ ID NO: 2086 - protein, 151 aa, Human
DIQMTQSPSSLSASVGDRVTITCRASQSISSYLNWYQQKPGKAPKLLIYAASSLQSGVPSRFSGSGSGTDFTLTISSLQPEDFATYYCQQSYSKNTFGQGTKLEIKRTVAAPSVFIFPPSDEQLKSGTASVVCLLNNFYPREAKVQWKVDN

SEQ ID NO: 2087 - protein, 106 aa, Human
DIQMTQSPSSLSASVGDRVTITCRASQSISSYLNWYQQKPGKAPKLLIYAASSLQSGVPSRFSGSGSGTDFTLTISSLQPEDFATYYCQQSYSKNTFGQGTKLEIK

SEQ ID NO: 2088 - protein, 11 aa, Human
RASQSISSYLN

SEQ ID NO: 2089 - protein, 7 aa, Human
AASSLQS

SEQ ID NO: 2090 - protein, 8 aa, Human
QQSYSKNT

SEQ ID NO: 2091 - protein, 23 aa, Human
DIQMTQSPSSLSASVGDRVTITC

SEQ ID NO: 2092 - protein, 15 aa, Human
WYQQKPGKAPKLLIY

SEQ ID NO: 2093 - protein, 32 aa, Human; identical to SEQ ID NO: 305

SEQ ID NO: 2094 - protein, 10 aa, Human
FGQGTKLEIK

SEQ ID NO: 2095 - protein, 180 aa, Human
EVQLVESGGGLVQPGGSLRLSCAASGFTFSTYWMSWVRQAPGKGLEWVANIKQDGSEKYYVDSVKGRFTISRDNAKNSLYLQMNSLRAEDTAVYYCASKLWLRGNFDYWGQGTLVTVSSASTKGPSVFPLAPSSKSTSGGTAALGCLVKDYFPEPVTVSWNSGALTSGVHTFPAVLQSSG

SEQ ID NO: 2096 - protein, 119 aa, Human
EVQLVESGGGLVQPGGSLRLSCAASGFTFSTYWMSWVRQAPGKGLEWVANIKQDGSEKYYVDSVKGRFTISRDNAKNSLYLQMNSLRAEDTAVYYCASKLWLRGNFDYWGQGTLVTVSS

SEQ ID NO: 2097 - protein, 5 aa, Human
TYWMS

SEQ ID NO: 2098 - protein, 17 aa, Human
NIKQDGSEKYYVDSVKG

SEQ ID NO: 2099 - protein, 10 aa, Human
KLWLRGNFDY

SEQ ID NO: 2100 - protein, 30 aa, Human; identical to SEQ ID NO: 870

SEQ ID NO: 2101 - protein, 14 aa, Human
WVRQAPGKGLEWVA

SEQ ID NO: 2102 - protein, 32 aa, Human
RFTISRDNAKNSLYLQMNSLRAEDTAVYYCAS

SEQ ID NO: 2103 - protein, 11 aa, Human
WGQGTLVTVSS

SEQ ID NO: 2104 - protein, 192 aa, Human
NFMLTQPHSVSESPGKTVTISCTGSSGSIASNYVQWYQQRPGSAPTTVIYEDNQRPSGVPDRFSGSIDSSSNSASLTISGLKTEDEADYYCQSYDSSNLVFGGGTKLTVLGQPKAAPSVTLFPPSSEELQANKATLVCLISDFYPGAVTVAWKADSSPVKAGVETTTPSKQSNNKYAASSYLSLTPEQWKSH

SEQ ID NO: 2105 - protein, 110 aa, Human
NFMLTQPHSVSESPGKTVTISCTGSSGSIASNYVQWYQQRPGSAPTTVIYEDNQRPSGVPDRFSGSIDSSSNSASLTISGLKTEDEADYYCQSYDSSNLVFGGGTKLTVL

SEQ ID NO: 2106 - protein, 13 aa, Human
TGSSGSIASNYVQ

SEQ ID NO: 2107 - protein, 7 aa, Human
EDNQRPS

SEQ ID NO: 2108 - protein, 9 aa, Human
QSYDSSNLV

SEQ ID NO: 2109 - protein, 22 aa, Human
NFMLTQPHSVSESPGKTVTISC

SEQ ID NO: 2110 - protein, 15 aa, Human
WYQQRPGSAPTTVIY

SEQ ID NO: 2111 - protein, 34 aa, Human
GVPDRFSGSIDSSSNSASLTISGLKTEDEADYYC

SEQ ID NO: 2112 - protein, 10 aa, Human
FGGGTKLTVL

SEQ ID NO: 2113 - protein, 152 aa, Human
QVQLVESGGGVVQPGRSLRLSCAASGFTFSGYGMHWVRQAPGKGLEWVAVIWFDGSNKYYADSVKGRFTISRDNSKNTLYLQMNSLRAEDTAVYYCARDARYYDTSGYLGTTEFDYWGQGTLVTVSSGSASAPTLFPLVSCENSPSDTSSVA

SEQ ID NO: 2114 - protein, 127 aa, Human
QVQLVESGGGVVQPGRSLRLSCAASGFTFSGYGMHWVRQAPGKGLEWVAVIWFDGSNKYYADSVKGRFTISRDNSKNTLYLQMNSLRAEDTAVYYCARDARYYDTSGYLGTTEFDYWGQGTLVTVSS

SEQ ID NO: 2115 - protein, 5 aa, Human
GYGMH

SEQ ID NO: 2116 - protein, 17 aa, Human
VIWFDGSNKYYADSVKG

SEQ ID NO: 2117 - protein, 18 aa, Human
DARYYDTSGYLGTTEFDY

SEQ ID NO: 2118 - protein, 30 aa, Human; identical to SEQ ID NO: 168

SEQ ID NO: 2119 - protein, 14 aa, Human
WVRQAPGKGLEWVA

SEQ ID NO: 2120 - protein, 32 aa, Human; identical to SEQ ID NO: 170

SEQ ID NO: 2121 - protein, 11 aa, Human
WGQGTLVTVSS

SEQ ID NO: 2122 - protein, 187 aa, Human
EVVLTQSPATLSVSPGERATLSCRASQSVSSNLAWYQQKPGQAPRLLIYGASTRATGIPARFSGSGSGTEFTLTISSLQSEDFAVYYCQQYNNWPRTFGQGTKVEIKRTVAAPSVFIFPPSDEQLKSGTASVVCLLNNFYPREAKVQWKVDNALQSGNSQESVTEQDSKDSTYSLSSTLTLSKADYE

SEQ ID NO: 2123 - protein, 107 aa, Human
EVVLTQSPATLSVSPGERATLSCRASQSVSSNLAWYQQKPGQAPRLLIYGASTRATGIPARFSGSGSGTEFTLTISSLQSEDFAVYYCQQYNNWPRTFGQGTKVEIK

SEQ ID NO: 2124 - protein, 11 aa, Human
RASQSVSSNLA

SEQ ID NO: 2125 - protein, 7 aa, Human
GASTRAT

SEQ ID NO: 2126 - protein, 9 aa, Human
QQYNNWPRT

SEQ ID NO: 2127 - protein, 23 aa, Human
EVVLTQSPATLSVSPGERATLSC

SEQ ID NO: 2128 - protein, 15 aa, Human
WYQQKPGQAPRLLIY

SEQ ID NO: 2129 - protein, 32 aa, Human; identical to SEQ ID NO: 251

SEQ ID NO: 2130 - protein, 10 aa, Human
FGQGTKVEIK

SEQ ID NO: 2131 - protein, 222 aa, Human
QVQLVESGGGVVQPGRSLRLSCAASGFTFRSYGMHWVRQAPGKGLEWVAVISYDGSNKNYADSVKGRLTISRDNSKNTLYLQMNSLRAEDTAVYYCAKDRGGYSSGWTYYYYGMDVWGQGTTVTVSSASTKGPSVFPLAPSSKSTSGGTAALGCLVKDYFPEPVTVSWNSGALTSGVHTFPAVLQSSGLYSLSSVVTVPSSSLGTQTYICNVNHKPSNTKVD

SEQ ID NO: 2132 - protein, 127 aa, Human
QVQLVESGGGVVQPGRSLRLSCAASGFTFRSYGMHWVRQAPGKGLEWVAVISYDGSNKNYADSVKGRLTISRDNSKNTLYLQMNSLRAEDTAVYYCAKDRGGYSSGWTYYYYGMDVWGQGTTVTVSS

SEQ ID NO: 2133 - protein, 5 aa, Human
SYGMH

SEQ ID NO: 2134 - protein, 17 aa, Human
VISYDGSNKNYADSVKG

SEQ ID NO: 2135 - protein, 18 aa, Human
DRGGYSSGWTYYYYGMDV

SEQ ID NO: 2136 - protein, 30 aa, Human
QVQLVESGGGVVQPGRSLRLSCAASGFTFR

SEQ ID NO: 2137 - protein, 14 aa, Human
WVRQAPGKGLEWVA

SEQ ID NO: 2138 - protein, 32 aa, Human
RLTISRDNSKNTLYLQMNSLRAEDTAVYYCAK

SEQ ID NO: 2139 - protein, 11 aa, Human
WGQGTTVTVSS

SEQ ID NO: 2140 - protein, 187 aa, Human
DIQMTQSPSSLSASVGDRVTITCQASQDISNYLNWYQQKPGKAPKLLIYDASNLETGVPSRFSGSGSGTDFTFTISSLQPEDIATYYCQQYDNLPLTFGGGTKVEIKRTVAAPSVFIFPPSDEQLKSGTASVVCLLNNFYPREAKVQWKVDNALQSGNSQESVTEQDSKDSTYSLSSTLTLSKADYE

SEQ ID NO: 2141 - protein, 107 aa, Human
DIQMTQSPSSLSASVGDRVTITCQASQDISNYLNWYQQKPGKAPKLLIYDASNLETGVPSRFSGSGSGTDFTFTISSLQPEDIATYYCQQYDNLPLTFGGGTKVEIK

SEQ ID NO: 2142 - protein, 11 aa, Human
QASQDISNYLN

SEQ ID NO: 2143 - protein, 7 aa, Human
DASNLET

SEQ ID NO: 2144 - protein, 9 aa, Human
QQYDNLPLT

SEQ ID NO: 2145 - protein, 23 aa, Human
DIQMTQSPSSLSASVGDRVTITC

SEQ ID NO: 2146 - protein, 15 aa, Human
WYQQKPGKAPKLLIY

SEQ ID NO: 2147 - protein, 32 aa, Human; identical to SEQ ID NO: 1529

SEQ ID NO: 2148 - protein, 10 aa, Human
FGGGTKVEIK

SEQ ID NO: 2149 - protein, 215 aa, Human
EVQLLESGGGLVQPGGSLRLSCAASGFTFSSYAMSWVRQAPGKGLEWVSAIRGSGGSTYYADSVKGRFTISRDNSKNTLYLQMNSLRAEDTAVYYCAKGVRSSDDYFEYWGQGTLVTVSSASTKGPSVFPLAPSSKSTSGGTAALGCLVKDYFPEPVTVSWNSGALTSGVHTFPAVLQSSGLYSLSSVVTVPSSSLGTQTYICNVNHKPSNTKVD

SEQ ID NO: 2150 - protein, 120 aa, Human
EVQLLESGGGLVQPGGSLRLSCAASGFTFSSYAMSWVRQAPGKGLEWVSAIRGSGGSTYYADSVKGRFTISRDNSKNTLYLQMNSLRAEDTAVYYCAKGVRSSDDYFEYWGQGTLVTVSS

SEQ ID NO: 2151 - protein, 5 aa, Human
SYAMS

SEQ ID NO: 2152 - protein, 17 aa, Human
AIRGSGGSTYYADSVKG

SEQ ID NO: 2153 - protein, 11 aa, Human
GVRSSDDYFEY

SEQ ID NO: 2154 - protein, 30 aa, Human; identical to SEQ ID NO: 798

SEQ ID NO: 2155 - protein, 14 aa, Human
WVRQAPGKGLEWVS

SEQ ID NO: 2156 - protein, 32 aa, Human; identical to SEQ ID NO: 692

SEQ ID NO: 2157 - protein, 11 aa, Human
WGQGTLVTVSS

SEQ ID NO: 2158 - protein, 187 aa, Human
DIQMTQSPSTLSASVGDRVTITCRASQSITSWLAWYQQKPGKAPKLLIYDASSLESGVPSRFSGSGSGTEFTLTISSLQPDDFATYYCQHYNSYPWTFGQGTKVEIKRTVAAPSVFIFPPSDEQLKSGTASVVCLLNNFYPREAKVQWKVDNALQSGNSQESVTEQDSKDSTYSLSSTLTLSKADYE

SEQ ID NO: 2159 - protein, 107 aa, Human
DIQMTQSPSTLSASVGDRVTITCRASQSITSWLAWYQQKPGKAPKLLIYDASSLESGVPSRFSGSGSGTEFTLTISSLQPDDFATYYCQHYNSYPWTFGQGTKVEIK

SEQ ID NO: 2160 - protein, 11 aa, Human
RASQSITSWLA

SEQ ID NO: 2161 - protein, 7 aa, Human
DASSLES

SEQ ID NO: 2162 - protein, 9 aa, Human
QHYNSYPWT

SEQ ID NO: 2163 - protein, 23 aa, Human
DIQMTQSPSTLSASVGDRVTITC

SEQ ID NO: 2164 - protein, 15 aa, Human
WYQQKPGKAPKLLIY

SEQ ID NO: 2165 - protein, 32 aa, Human; identical to SEQ ID NO: 737

SEQ ID NO: 2166 - protein, 10 aa, Human
FGQGTKVEIK

SEQ ID NO: 2167 - protein, 145 aa, Human
EVQLVQSGAEVKKPGESLKISCKGSGYYFPSYWIGWVRQKPGNGPEWMGIIHPGDSESTYSPSFQGQVTISADKSISTAYLQWSSLKASDTAMYYCARPFYYGSESPPGYWGQGTLVTVSSGSASAPTLFPLVSCENSPSDTSSV

SEQ ID NO: 2168 - protein, 121 aa, Human
EVQLVQSGAEVKKPGESLKISCKGSGYYFPSYWIGWVRQKPGNGPEWMGIIHPGDSESTYSPSFQGQVTISADKSISTAYLQWSSLKASDTAMYYCARPFYYGSESPPGYWGQGTLVTVSS

SEQ ID NO: 2169 - protein, 5 aa, Human
SYWIG

SEQ ID NO: 2170 - protein, 17 aa, Human
IIHPGDSESTYSPSFQG

SEQ ID NO: 2171 - protein, 12 aa, Human
PFYYGSESPPGY

SEQ ID NO: 2172 - protein, 30 aa, Human
EVQLVQSGAEVKKPGESLKISCKGSGYYFP

SEQ ID NO: 2173 - protein, 14 aa, Human
WVRQKPGNGPEWMG

SEQ ID NO: 2174 - protein, 32 aa, Human; identical to SEQ ID NO: 944

SEQ ID NO: 2175 - protein, 11 aa, Human
WGQGTLVTVSS

SEQ ID NO: 2176 - protein, 154 aa, Human
EIVLTQSPGTLSLSPGERATLSCRASQSVSSSYLAWYQQKPGQAPRLLIYGASSRATGIPDRFSGSGSGTDFTLTISRLEAEDFAVYYCQLFGSSPTWTFGQGTKVEIKRTVAAPSVFIFPPSDEQLKSGTASVVCLLNNFYPREAKVQWKVDN

SEQ ID NO: 2177 - protein, 109 aa, Human
EIVLTQSPGTLSLSPGERATLSCRASQSVSSSYLAWYQQKPGQAPRLLIYGASSRATGIPDRFSGSGSGTDFTLTISRLEAEDFAVYYCQLFGSSPTWTFGQGTKVEIK

SEQ ID NO: 2178 - protein, 12 aa, Human
RASQSVSSSYLA

SEQ ID NO: 2179 - protein, 7 aa, Human
GASSRAT

SEQ ID NO: 2180 - protein, 10 aa, Human
QLFGSSPTWT

SEQ ID NO: 2181 - protein, 23 aa, Human
EIVLTQSPGTLSLSPGERATLSC

SEQ ID NO: 2182 - protein, 15 aa, Human
WYQQKPGQAPRLLIY

SEQ ID NO: 2183 - protein, 32 aa, Human
GIPDRFSGSGSGTDFTLTISRLEAEDFAVYYC

SEQ ID NO: 2184 - protein, 10 aa, Human
FGQGTKVEIK

SEQ ID NO: 2185 - protein, 135 aa, Human
QLQLQESGPGLMKPSETLSLTCTVSGGSISRSNYYWGWIRQPPGKGLEWIGSIYYSGSTYYNPSLKSRVTISVDTSQNQFSLKMSSVTAADTAVYYCASLFDYGDNYWGQGTLVTVSSASTKGPSVFPLAPSSKS

SEQ ID NO: 2186 - protein, 118 aa, Human
QLQLQESGPGLMKPSETLSLTCTVSGGSISRSNYYWGWIRQPPGKGLEWIGSIYYSGSTYYNPSLKSRVTISVDTSQNQFSLKMSSVTAADTAVYYCASLFDYGDNYWGQGTLVTVSS

SEQ ID NO: 2187 - protein, 7 aa, Human
RSNYYWG

SEQ ID NO: 2188 - protein, 16 aa, Human
SIYYSGSTYYNPSLKS

SEQ ID NO: 2189 - protein, 8 aa, Human
LFDYGDNY

SEQ ID NO: 2190 - protein, 30 aa, Human
QLQLQESGPGLMKPSETLSLTCTVSGGSIS

SEQ ID NO: 2191 - protein, 14 aa, Human
WIRQPPGKGLEWIG

SEQ ID NO: 2192 - protein, 32 aa, Human
RVTISVDTSQNQFSLKMSSVTAADTAVYYCAS

SEQ ID NO: 2193 - protein, 11 aa, Human
WGQGTLVTVSS

SEQ ID NO: 2194 - protein, 181 aa, Human
QLVLTQSPSASASLGASVKLTCTLSSGHSSYAIAWHQQQPERGPRYLMKLNGDGSHSKGDGIPDRFSGSSSGAERYLTISSLQSEDEADYYCQTWGTDIQVFGGGTKLTVLGQPKAAPSVTLFPPSSEELQANKATLVCLISDFYPGAVTVAWKADSSPVKAGVETTTPSKQSNNKYAASS

SEQ ID NO: 2195 - protein, 111 aa, Human
QLVLTQSPSASASLGASVKLTCTLSSGHSSYAIAWHQQQPERGPRYLMKLNGDGSHSKGDGIPDRFSGSSSGAERYLTISSLQSEDEADYYCQTWGTDIQVFGGGTKLTVL

SEQ ID NO: 2196 - protein, 12 aa, Human
TLSSGHSSYAIA

SEQ ID NO: 2197 - protein, 11 aa, Human
LNGDGSHSKGD

SEQ ID NO: 2198 - protein, 9 aa, Human
QTWGTDIQV

SEQ ID NO: 2199 - protein, 22 aa, Human
QLVLTQSPSASASLGASVKLTC

SEQ ID NO: 2200 - protein, 15 aa, Human
WHQQQPERGPRYLMK

SEQ ID NO: 2201 - protein, 32 aa, Human; identical to SEQ ID NO: 269

SEQ ID NO: 2202 - protein, 10 aa, Human
FGGGTKLTVL

SEQ ID NO: 2203 - protein, 175 aa, Human
QVQLVQSGAEVKKPGSSVKVSCKASGGTFSSYAISWVRQARGQGLEWMGGIIPIFGTANYPQKFQGRVTITADESTSTAYMELSSLRSEDTAVYYCARYHAYDSSGYYVDYWGQGTLVTVSSASPTSPKVFPLSLCSTQPDGNVVIACLVQGFFPQEPLSVTWSESGQGVTARNF

SEQ ID NO: 2204 - protein, 122 aa, Human
QVQLVQSGAEVKKPGSSVKVSCKASGGTFSSYAISWVRQARGQGLEWMGGIIPIFGTANYPQKFQGRVTITADESTSTAYMELSSLRSEDTAVYYCARYHAYDSSGYYVDYWGQGTLVTVSS

SEQ ID NO: 2205 - protein, 5 aa, Human
SYAIS

SEQ ID NO: 2206 - protein, 17 aa, Human
GIIPIFGTANYPQKFQG

SEQ ID NO: 2207 - protein, 13 aa, Human
YHAYDSSGYYVDY

SEQ ID NO: 2208 - protein, 30 aa, Human; identical to SEQ ID NO: 384

SEQ ID NO: 2209 - protein, 14 aa, Human
WVRQARGQGLEWMG

SEQ ID NO: 2210 - protein, 32 aa, Human; identical to SEQ ID NO: 1538

SEQ ID NO: 2211 - protein, 11 aa, Human
WGQGTLVTVSS

SEQ ID NO: 2212 - protein, 154 aa, Human
EIVLTQSPATLSLSPGERATLSCRASQSISSFLAWYQQKPGQAPRLLIYDASNRATGIPARFSGSGSGTDFILTINNLEPEDFAVYYCQQRSNWPPKLTFGGGTKVEIKRTVAAPSVFIFPPSDEQLKSGTASVVCLLNNFYPREAKVQWKVDN

SEQ ID NO: 2213 - protein, 109 aa, Human
EIVLTQSPATLSLSPGERATLSCRASQSISSFLAWYQQKPGQAPRLLIYDASNRATGIPARFSGSGSGTDFILTINNLEPEDFAVYYCQQRSNWPPKLTFGGGTKVEIK

SEQ ID NO: 2214 - protein, 11 aa, Human
RASQSISSFLA

SEQ ID NO: 2215 - protein, 7 aa, Human
DASNRAT

SEQ ID NO: 2216 - protein, 11 aa, Human
QQRSNWPPKLT

SEQ ID NO: 2217 - protein, 23 aa, Human
EIVLTQSPATLSLSPGERATLSC

SEQ ID NO: 2218 - protein, 15 aa, Human
WYQQKPGQAPRLLIY

SEQ ID NO: 2219 - protein, 32 aa, Human
GIPARFSGSGSGTDFILTINNLEPEDFAVYYC

SEQ ID NO: 2220 - protein, 10 aa, Human
FGGGTKVEIK

SEQ ID NO: 2221 - protein, 141 aa, Human
QVQLQESGPGLVKPSETLSLTCTVSGGSMSSSYWSWIRQPPGKGLEWIGYIYYRGSTNYNPSLKTRVTMSVDTSKNQFSMKMTFMTAADTAVYYCAREAAFNWFDSWGQGTLVTVSSGSASAPTLFPLVSCENSPSDTSSV

SEQ ID NO: 2222 - protein, 117 aa, Human
QVQLQESGPGLVKPSETLSLTCTVSGGSMSSSYWSWIRQPPGKGLEWIGYIYYRGSTNYNPSLKTRVTMSVDTSKNQFSMKMTFMTAADTAVYYCAREAAFNWFDSWGQGTLVTVSS

SEQ ID NO: 2223 - protein, 5 aa, Human
SSYWS

SEQ ID NO: 2224 - protein, 16 aa, Human
YIYYRGSTNYNPSLKT

SEQ ID NO: 2225 - protein, 9 aa, Human
EAAFNWFDS

SEQ ID NO: 2226 - protein, 30 aa, Human
QVQLQESGPGLVKPSETLSLTCTVSGGSMS

SEQ ID NO: 2227 - protein, 14 aa, Human
WIRQPPGKGLEWIG

SEQ ID NO: 2228 - protein, 32 aa, Human
RVTMSVDTSKNQFSMKMTFMTAADTAVYYCAR

SEQ ID NO: 2229 - protein, 11 aa, Human
WGQGTLVTVSS

SEQ ID NO: 2230 - protein, 152 aa, Human
DIQMTQSPSSLSASVGDRVTITCRASQGISSYLAWFQQKPGKAPKSLIYAASSLQSGVPSKFSGSGSGTDFTLTISSLQPEDFATYYCQQYNRYPPTFGGGTKVEIKRTVAAPSVFIFPPSDEQLKSGTASVVCLLNNFYPREAKVQWKVDN

SEQ ID NO: 2231 - protein, 106 aa, Human
DIQMTQSPSSLSASVGDRVTITCRASQGISSYLAWFQQKPGKAPKSLIYAASSLQSGVPSKFSGSGSGTDFTLTISSLQPEDFATYYCQQYNRYPPTFGGGTKVEI

SEQ ID NO: 2232 - protein, 11 aa, Human
RASQGISSYLA

SEQ ID NO: 2233 - protein, 7 aa, Human
AASSLQS

SEQ ID NO: 2234 - protein, 9 aa, Human
QQYNRYPPT

SEQ ID NO: 2235 - protein, 23 aa, Human
DIQMTQSPSSLSASVGDRVTITC

SEQ ID NO: 2236 - protein, 15 aa, Human
WFQQKPGKAPKSLIY

SEQ ID NO: 2237 - protein, 32 aa, Human
GVPSKFSGSGSGTDFTLTISSLQPEDFATYYC

SEQ ID NO: 2238 - protein, 9 aa, Human
FGGGTKVEI

SEQ ID NO: 2239 - protein, 144 aa, Human
EVQLVESGGGLVQPGGSLRLSCAASGFTLSIYWMSWVRQAPGKGLEWVANIKQDGREKYHVDSVKGRFTISRDNANNSLYLQMNNLRAEDTAVYFCARDGIAVAGGFDYWGQGTLVTVSSGSASAPTLFPLVSCENSPSDTSSV

SEQ ID NO: 2240 - protein, 120 aa, Human
EVQLVESGGGLVQPGGSLRLSCAASGFTLSIYWMSWVRQAPGKGLEWVANIKQDGREKYHVDSVKGRFTISRDNANNSLYLQMNNLRAEDTAVYFCARDGIAVAGGFDYWGQGTLVTVSS

SEQ ID NO: 2241 - protein, 5 aa, Human
IYWMS

SEQ ID NO: 2242 - protein, 17 aa, Human
NIKQDGREKYHVDSVKG

SEQ ID NO: 2243 - protein, 11 aa, Human
DGIAVAGGFDY

SEQ ID NO: 2244 - protein, 30 aa, Human; identical to SEQ ID NO: 150

SEQ ID NO: 2245 - protein, 14 aa, Human
WVRQAPGKGLEWVA

SEQ ID NO: 2246 - protein, 32 aa, Human
RFTISRDNANNSLYLQMNNLRAEDTAVYFCAR

SEQ ID NO: 2247 - protein, 11 aa, Human
WGQGTLVTVSS

SEQ ID NO: 2248 - protein, 177 aa, Human
SYELTQPPSVSVSPGQTASITCSGDKLGDTYACWYQQKPGQSPVLVIYQDSKRPSGIPERFSGSNSGNTATLTISGTQAMDEADYYCQAWDSSTSVVFGGGTKLTVLGQPKAAPSVTLFPPSSEELQANKATLVCLISDFYPGAVTVAWKADSSPVKAGVETTTPSKQSNNKYAASS

SEQ ID NO: 2249 - protein, 107 aa, Human
SYELTQPPSVSVSPGQTASITCSGDKLGDTYACWYQQKPGQSPVLVIYQDSKRPSGIPERFSGSNSGNTATLTISGTQAMDEADYYCQAWDSSTSVVFGGGTKLTVL

SEQ ID NO: 2250 - protein, 11 aa, Human
SGDKLGDTYAC

SEQ ID NO: 2251 - protein, 7 aa, Human
QDSKRPS

SEQ ID NO: 2252 - protein, 10 aa, Human
QAWDSSTSVV

SEQ ID NO: 2253 - protein, 22 aa, Human
SYELTQPPSVSVSPGQTASITC

SEQ ID NO: 2254 - protein, 15 aa, Human
WYQQKPGQSPVLVIY

SEQ ID NO: 2255 - protein, 32 aa, Human; identical to SEQ ID NO: 467

SEQ ID NO: 2256 - protein, 10 aa, Human
FGGGTKLTVL

SEQ ID NO: 2257 - protein, 144 aa, Human
QVQLVESGGGVVQPGRSLRLSCAASGFTFSSYAMHWVRQAPGKGLEWVAVISYDGGNKYYADSVKGRFTISRDNSKNTLYLQMNSLRAEDTAVYYCARGHGNYLTYFDYWGQGTLVTVSSGSASAPTLFPLVSCENSPSDTSSV

SEQ ID NO: 2258 - protein, 120 aa, Human
QVQLVESGGGVVQPGRSLRLSCAASGFTFSSYAMHWVRQAPGKGLEWVAVISYDGGNKYYADSVKGRFTISRDNSKNTLYLQMNSLRAEDTAVYYCARGHGNYLTYFDYWGQGTLVTVSS

SEQ ID NO: 2259 - protein, 5 aa, Human
SYAMH

SEQ ID NO: 2260 - protein, 17 aa, Human
VISYDGGNKYYADSVKG

SEQ ID NO: 2261 - protein, 11 aa, Human
GHGNYLTYFDY

SEQ ID NO: 2262 - protein, 30 aa, Human; identical to SEQ ID NO: 168

SEQ ID NO: 2263 - protein, 14 aa, Human
WVRQAPGKGLEWVA

SEQ ID NO: 2264 - protein, 32 aa, Human; identical to SEQ ID NO: 170

SEQ ID NO: 2265 - protein, 11 aa, Human
WGQGTLVTVSS

SEQ ID NO: 2266 - protein, 153 aa, Human
EIVLTQSPGTLSLSPGERATLSCRASQSISSNYLAWYQQKPGQAPRLLIYGASSRATGIPDRFSGSGSGTDFTLTISRLEPEDFAVYYCQQYGSSPLTFGPGTKVDIKRTVAAPSVFIFPPSDEQLKSGTASVVCLLNNFYPREAKVQWKVDN

SEQ ID NO: 2267 - protein, 108 aa, Human
EIVLTQSPGTLSLSPGERATLSCRASQSISSNYLAWYQQKPGQAPRLLIYGASSRATGIPDRFSGSGSGTDFTLTISRLEPEDFAVYYCQQYGSSPLTFGPGTKVDIK

SEQ ID NO: 2268 - protein, 12 aa, Human
RASQSISSNYLA

SEQ ID NO: 2269 - protein, 7 aa, Human
GASSRAT

SEQ ID NO: 2270 - protein, 9 aa, Human
QQYGSSPLT

SEQ ID NO: 2271 - protein, 23 aa, Human
EIVLTQSPGTLSLSPGERATLSC

SEQ ID NO: 2272 - protein, 15 aa, Human
WYQQKPGQAPRLLIY

SEQ ID NO: 2273 - protein, 32 aa, Human; identical to SEQ ID NO: 233

SEQ ID NO: 2274 - protein, 10 aa, Human
FGPGTKVDIK

SEQ ID NO: 2275 - protein, 206 aa, Human
EVQLVESGGGLVQPGGSLRLSCAASGFTFSSSWIHWVRQAPGKGLVWVSRINSDGSSTTYADSVKGRFTISRDNAKNTLFLQMNSLRAEDTAVYYCARAEWLRGQFDYWGQGTLVTVSSPPTKAPDVFPIISGCRHPKDNSPVVLACLITGYHPTSVTVTWYMGTQSQPQRTFPEIQRRDSYYMTSSQLSTPLQQWRQGEYKCVVQ

SEQ ID NO: 2276 - protein, 119 aa, Human
EVQLVESGGGLVQPGGSLRLSCAASGFTFSSSWIHWVRQAPGKGLVWVSRINSDGSSTTYADSVKGRFTISRDNAKNTLFLQMNSLRAEDTAVYYCARAEWLRGQFDYWGQGTLVTVSS

SEQ ID NO: 2277 - protein, 5 aa, Human
SSWIH

SEQ ID NO: 2278 - protein, 17 aa, Human
RINSDGSSTTYADSVKG

SEQ ID NO: 2279 - protein, 10 aa, Human
AEWLRGQFDY

SEQ ID NO: 2280 - protein, 30 aa, Human; identical to SEQ ID NO: 870

SEQ ID NO: 2281 - protein, 14 aa, Human
WVRQAPGKGLVWVS

SEQ ID NO: 2282 - protein, 32 aa, Human
RFTISRDNAKNTLFLQMNSLRAEDTAVYYCAR

SEQ ID NO: 2283 - protein, 11 aa, Human
WGQGTLVTVSS

SEQ ID NO: 2284 - protein, 193 aa, Human
NFMLTQPHSVSESPGKTVTISCTGSSGSIASNYVQWYQQRPGSAPTTVIYEDNQRPSGVPDRFSGSIDSSSNSASLTISGLKTEDEADYYCQSYDTSNHVVFGGGTKLTVLGQPKAAPSVTLFPPSSEELQANKATLVCLISDFYPGAVTVAWKADSSPVKAGVETTTPSKQSNNKYAASSYLSLTPEQWKSH

SEQ ID NO: 2285 - protein, 111 aa, Human
NFMLTQPHSVSESPGKTVTISCTGSSGSIASNYVQWYQQRPGSAPTTVIYEDNQRPSGVPDRFSGSIDSSSNSASLTISGLKTEDEADYYCQSYDTSNHVVFGGGTKLTVL

SEQ ID NO: 2286 - protein, 13 aa, Human
TGSSGSIASNYVQ

SEQ ID NO: 2287 - protein, 7 aa, Human
EDNQRPS

SEQ ID NO: 2288 - protein, 10 aa, Human
QSYDTSNHVV

SEQ ID NO: 2289 - protein, 22 aa, Human
NFMLTQPHSVSESPGKTVTISC

SEQ ID NO: 2290 - protein, 15 aa, Human
WYQQRPGSAPTTVIY

SEQ ID NO: 2291 - protein, 34 aa, Human; identical to SEQ ID NO: 2111

SEQ ID NO: 2292 - protein, 10 aa, Human
FGGGTKLTVL

SEQ ID NO: 2293 - protein, 217 aa, Human
EVQLVQSGAEVKNPGESLKISCKGSGYRFTTYWIGWVRQMPGKGLEWMGIIYPGDSDTRYSPSFEGQVTISADKSISTAYLQWSSLKASDTAMYYCARHPLGLGGSIDYWGQGTLVTVSSASTKGPSVFPLAPSSKSTSGGTAALGCLVKDYFPEPVTVSWNSGALTSGVHTFPAVLQSSGLYSLSSVVTVPSSSLGTQTYICNVNHKPTLVLLGLF

SEQ ID NO: 2294 - protein, 120 aa, Human
EVQLVQSGAEVKNPGESLKISCKGSGYRFTTYWIGWVRQMPGKGLEWMGIIYPGDSDTRYSPSFEGQVTISADKSISTAYLQWSSLKASDTAMYYCARHPLGLGGSIDYWGQGTLVTVSS

SEQ ID NO: 2295 - protein, 5 aa, Human
TYWIG

SEQ ID NO: 2296 - protein, 17 aa, Human
IIYPGDSDTRYSPSFEG

SEQ ID NO: 2297 - protein, 11 aa, Human
HPLGLGGSIDY

SEQ ID NO: 2298 - protein, 30 aa, Human
EVQLVQSGAEVKNPGESLKISCKGSGYRFT

SEQ ID NO: 2299 - protein, 14 aa, Human
WVRQMPGKGLEWMG

SEQ ID NO: 2300 - protein, 32 aa, Human; identical to SEQ ID NO: 944

SEQ ID NO: 2301 - protein, 11 aa, Human
WGQGTLVTVSS

SEQ ID NO: 2302 - protein, 186 aa, Human
DIQMTQSPSTLSASVGDRVTITCRASQSISSWLAWYQQKPGKAPKLLIYDASSLESGVPSRFSGSGSGTEFTLTISSLQPDDFATYYCQQYNSHWTFGQGTKVEIKRTVAAPSVFIFPPSDEQLKSGTASVVCLLNNFYPREAKVQWKVDNALQSGNSQESVTEQDSKDSTYSLSSTLTLSKADYE

SEQ ID NO: 2303 - protein, 106 aa, Human
DIQMTQSPSTLSASVGDRVTITCRASQSISSWLAWYQQKPGKAPKLLIYDASSLESGVPSRFSGSGSGTEFTLTISSLQPDDFATYYCQQYNSHWTFGQGTKVEIK

SEQ ID NO: 2304 - protein, 11 aa, Human
RASQSISSWLA

SEQ ID NO: 2305 - protein, 7 aa, Human
DASSLES

SEQ ID NO: 2306 - protein, 8 aa, Human
QQYNSHWT

SEQ ID NO: 2307 - protein, 23 aa, Human
DIQMTQSPSTLSASVGDRVTITC

SEQ ID NO: 2308 - protein, 15 aa, Human
WYQQKPGKAPKLLIY

SEQ ID NO: 2309 - protein, 32 aa, Human; identical to SEQ ID NO: 737

SEQ ID NO: 2310 - protein, 10 aa, Human
FGQGTKVEIK

SEQ ID NO: 2311 - protein, 151 aa, Human
QVQLQQWGAGLLKPSETLSRTCAVYGGSFSGYYWSWIRQTPGKGLEWIGEINHDGSTIYNPSLKSRVTISIDTSKNQFSLQLSSVTAADTAVYYCARGSNPGDYWGQGALVTVSSAPTKAPDVFPIISGCRHPKDNSPVVLACLITGYHPT

SEQ ID NO: 2312 - protein, 115 aa, Human
QVQLQQWGAGLLKPSETLSRTCAVYGGSFSGYYWSWIRQTPGKGLEWIGEINHDGSTIYNPSLKSRVTISIDTSKNQFSLQLSSVTAADTAVYYCARGSNPGDYWGQGALVTVSS

SEQ ID NO: 2313 - protein, 5 aa, Human
GYYWS

SEQ ID NO: 2314 - protein, 16 aa, Human
EINHDGSTIYNPSLKS

SEQ ID NO: 2315 - protein, 7 aa, Human
GSNPGDY

SEQ ID NO: 2316 - protein, 30 aa, Human
QVQLQQWGAGLLKPSETLSRTCAVYGGSFS

SEQ ID NO: 2317 - protein, 14 aa, Human
WIRQTPGKGLEWIG

SEQ ID NO: 2318 - protein, 32 aa, Human
RVTISIDTSKNQFSLQLSSVTAADTAVYYCAR

SEQ ID NO: 2319 - protein, 11 aa, Human
WGQGALVTVSS

SEQ ID NO: 2320 - protein, 188 aa, Human
SYELTQSLSVSVALGQTARIPCGGNNIGSKNVHWYQQKPGQAPVLVIYSDRNRPSGIPERFSGSNSGNTATLTISRAQAGDEADYYCQVWDSSSVVFGGGTKLTVLRQPKAAPSVTLFPPSSEELQANKATLVCLISDFYPGAVTVAWKADSSPVKAGVETTTPSKQSNNKYAASSYLSLTPEQWKSH

SEQ ID NO: 2321 - protein, 106 aa, Human
SYELTQSLSVSVALGQTARIPCGGNNIGSKNVHWYQQKPGQAPVLVIYSDRNRPSGIPERFSGSNSGNTATLTISRAQAGDEADYYCQVWDSSSVVFGGGTKLTVL

SEQ ID NO: 2322 - protein, 11 aa, Human
GGNNIGSKNVH

SEQ ID NO: 2323 - protein, 7 aa, Human
SDRNRPS

SEQ ID NO: 2324 - protein, 9 aa, Human
QVWDSSSVV

SEQ ID NO: 2325 - protein, 22 aa, Human
SYELTQSLSVSVALGQTARIPC

SEQ ID NO: 2326 - protein, 15 aa, Human
WYQQKPGQAPVLVIY

SEQ ID NO: 2327 - protein, 32 aa, Human
GIPERFSGSNSGNTATLTISRAQAGDEADYYC

SEQ ID NO: 2328 - protein, 10 aa, Human
FGGGTKLTVL

SEQ ID NO: 2329 - protein, 180 aa, Human
QVHLQESGPGLVKPSQTLSLTCTVSGVSITTSGSYWSWIRQCPGKGLEWIGYIYSTGTTYYSPSLKSRLTISLDTSRNQFSLNLSSVTAADTAVFFCARKTYMDYFDYWGQGALITVSSASTKGPSVFPLAPSSKSTSGGTAALGCLVKDYFPEPVTVSWNSGALTSGVHTFPAVLQSSG

SEQ ID NO: 2330 - protein, 119 aa, Human
QVHLQESGPGLVKPSQTLSLTCTVSGVSITTSGSYWSWIRQCPGKGLEWIGYIYSTGTTYYSPSLKSRLTISLDTSRNQFSLNLSSVTAADTAVFFCARKTYMDYFDYWGQGALITVSS

SEQ ID NO: 2331 - protein, 7 aa, Human
TSGSYWS

SEQ ID NO: 2332 - protein, 16 aa, Human
YIYSTGTTYYSPSLKS

SEQ ID NO: 2333 - protein, 9 aa, Human
KTYMDYFDY

SEQ ID NO: 2334 - protein, 30 aa, Human
QVHLQESGPGLVKPSQTLSLTCTVSGVSIT

SEQ ID NO: 2335 - protein, 14 aa, Human
WIRQCPGKGLEWIG

SEQ ID NO: 2336 - protein, 32 aa, Human
RLTISLDTSRNQFSLNLSSVTAADTAVFFCAR

SEQ ID NO: 2337 - protein, 11 aa, Human
WGQGALITVSS

SEQ ID NO: 2338 - protein, 190 aa, Human
QSALTQPTSVSGSPGQSITISCTGTSSDVGRYNLVSWYQQYPGKAPKLIIFEVSKRPSGVSDRFSASKSGNTASLTISGLQADDEADYYCCTYALTFLFGGGTKVTVLGQPKAAPSVTLFPPSSEELQANKATLVCLISDFYPGAVTVAWKADSSPVKAGVETTTPSKQSNNKYAASSYLSLTPEQWKSH

SEQ ID NO: 2339 - protein, 108 aa, Human
QSALTQPTSVSGSPGQSITISCTGTSSDVGRYNLVSWYQQYPGKAPKLIIFEVSKRPSGVSDRFSASKSGNTASLTISGLQADDEADYYCCTYALTFLFGGGTKVTVL

SEQ ID NO: 2340 - protein, 14 aa, Human
TGTSSDVGRYNLVS

SEQ ID NO: 2341 - protein, 7 aa, Human
EVSKRPS

SEQ ID NO: 2342 - protein, 8 aa, Human
CTYALTFL

SEQ ID NO: 2343 - protein, 22 aa, Human
QSALTQPTSVSGSPGQSITISC

SEQ ID NO: 2344 - protein, 15 aa, Human
WYQQYPGKAPKLIIF

SEQ ID NO: 2345 - protein, 32 aa, Human
GVSDRFSASKSGNTASLTISGLQADDEADYYC

SEQ ID NO: 2346 - protein, 10 aa, Human
FGGGTKVTVL

SEQ ID NO: 2347 - protein, 161 aa, Human
EVQLLESGGGLVQPGGSLRLSCAASGFTFYDYAMNWVRQTPGEGLEWVSAISGSGDPTYYADSVNGRFTISRDNSKNTLYLQMNSLRAEDTAIYYCAKDMEDFGFSWGQGTLVTVSSAPTKAPDVFPIISGCRHPKDNSPVVLACLITGYHPTSVTVTWYM

SEQ ID NO: 2348 - protein, 117 aa, Human
EVQLLESGGGLVQPGGSLRLSCAASGFTFYDYAMNWVRQTPGEGLEWVSAISGSGDPTYYADSVNGRFTISRDNSKNTLYLQMNSLRAEDTAIYYCAKDMEDFGFSWGQGTLVTVSS

SEQ ID NO: 2349 - protein, 5 aa, Human
DYAMN

SEQ ID NO: 2350 - protein, 17 aa, Human
AISGSGDPTYYADSVNG

SEQ ID NO: 2351 - protein, 8 aa, Human
DMEDFGFS

SEQ ID NO: 2352 - protein, 30 aa, Human
EVQLLESGGGLVQPGGSLRLSCAASGFTFY

SEQ ID NO: 2353 - protein, 14 aa, Human
WVRQTPGEGLEWVS

SEQ ID NO: 2354 - protein, 32 aa, Human
RFTISRDNSKNTLYLQMNSLRAEDTAIYYCAK

SEQ ID NO: 2355 - protein, 11 aa, Human
WGQGTLVTVSS

SEQ ID NO: 2356 - protein, 187 aa, Human
DIQMTQSPSSLSASVGDRVTITCRSGQSISTYLNWYQQKPGKAPKLLIYASSSLQSGVPSRFSGSGSGTDFTLTISSLQPEDFATYYCQQSFLPPRTFGQGTKLEIKRTVAAPSVFIFPPSDEQLKSGTASVVCLLNNFYPREAKVQWKVDNALQSGNSQESVTEQDSKDSTYSLSSTLTLSKADYE

SEQ ID NO: 2357 - protein, 107 aa, Human
DIQMTQSPSSLSASVGDRVTITCRSGQSISTYLNWYQQKPGKAPKLLIYASSSLQSGVPSRFSGSGSGTDFTLTISSLQPEDFATYYCQQSFLPPRTFGQGTKLEIK

SEQ ID NO: 2358 - protein, 11 aa, Human
RSGQSISTYLN

SEQ ID NO: 2359 - protein, 7 aa, Human
ASSSLQS

SEQ ID NO: 2360 - protein, 9 aa, Human
QQSFLPPRT

SEQ ID NO: 2361 - protein, 23 aa, Human
DIQMTQSPSSLSASVGDRVTITC

SEQ ID NO: 2362 - protein, 15 aa, Human
WYQQKPGKAPKLLIY

SEQ ID NO: 2363 - protein, 32 aa, Human; identical to SEQ ID NO: 305

SEQ ID NO: 2364 - protein, 10 aa, Human
FGQGTKLEIK

SEQ ID NO: 2365 - protein, 215 aa, Human
DVQLVQSGAEVTKPGESLKISCKGSGYSFTTYWIGWVRQMPGKGLEWMGIIYPGDSDTRYSPSFQGQVTISVDKSISTAYLQWSSLKASDTAMYYCARQFCGGDCPFDYWGRGTLVTVSSASTKGPSVFPLAPCSRSTSGGTAALGCLVKDYFPEPVTVSWNSGALTSGVHTFPAVLQSSGLYSLSSVVTVPSSSLGTQTYTCNVNHKPSNTKVD

SEQ ID NO: 2366 - protein, 120 aa, Human
DVQLVQSGAEVTKPGESLKISCKGSGYSFTTYWIGWVRQMPGKGLEWMGIIYPGDSDTRYSPSFQGQVTISVDKSISTAYLQWSSLKASDTAMYYCARQFCGGDCPFDYWGRGTLVTVSS

SEQ ID NO: 2367 - protein, 5 aa, Human
TYWIG

SEQ ID NO: 2368 - protein, 17 aa, Human
IIYPGDSDTRYSPSFQG

SEQ ID NO: 2369 - protein, 11 aa, Human
QFCGGDCPFDY

SEQ ID NO: 2370 - protein, 30 aa, Human
DVQLVQSGAEVTKPGESLKISCKGSGYSFT

SEQ ID NO: 2371 - protein, 14 aa, Human
WVRQMPGKGLEWMG

SEQ ID NO: 2372 - protein, 32 aa, Human
QVTISVDKSISTAYLQWSSLKASDTAMYYCAR

SEQ ID NO: 2373 - protein, 11 aa, Human
WGRGTLVTVSS

SEQ ID NO: 2374 - protein, 187 aa, Human
DIQMTQSPSTLSASVGDRVTITCRASQSISSWLAWYQQKPGKAPKLLIYDASSLEGGVPSRFSGSGSGTEFTLTISSLQPDDFATYYCQQYNSYPRTFGQGTKVEIKRTVAAPSVFIFPPSDEQLKSGTASVVCLLNNFYPREAKVQWKVDNALQSGNSQESVTEQDSKDSTYSLSSTLTLSKADYE

SEQ ID NO: 2375 - protein, 107 aa, Human
DIQMTQSPSTLSASVGDRVTITCRASQSISSWLAWYQQKPGKAPKLLIYDASSLEGGVPSRFSGSGSGTEFTLTISSLQPDDFATYYCQQYNSYPRTFGQGTKVEIK

SEQ ID NO: 2376 - protein, 11 aa, Human
RASQSISSWLA

SEQ ID NO: 2377 - protein, 7 aa, Human
DASSLEG

SEQ ID NO: 2378 - protein, 9 aa, Human
QQYNSYPRT

SEQ ID NO: 2379 - protein, 23 aa, Human
DIQMTQSPSTLSASVGDRVTITC

SEQ ID NO: 2380 - protein, 15 aa, Human
WYQQKPGKAPKLLIY

SEQ ID NO: 2381 - protein, 32 aa, Human; identical to SEQ ID NO: 737

SEQ ID NO: 2382 - protein, 10 aa, Human
FGQGTKVEIK

SEQ ID NO: 2383 - protein, 214 aa, Human
QVQLVQSGAEVKKPGASVKVSCKASGYTFTRYGMHWVRQAPGQRLKWMGWINAGNGNTKYSQKFQGRLTISRDTSASTAYMEVSSLRSEDTAVYYCARSGIAAAGSKVIYYYDMDVWGQGTTVTVSSAPTKAPDVFPIISGCRHPKDNSPVVLACLITGYHPTSVTVTWYMGTQSQPQRTFPEIQRRDSYYMTSSQLSTPLQQWRQGEYKCVVQ

SEQ ID NO: 2384 - protein, 127 aa, Human
QVQLVQSGAEVKKPGASVKVSCKASGYTFTRYGMHWVRQAPGQRLKWMGWINAGNGNTKYSQKFQGRLTISRDTSASTAYMEVSSLRSEDTAVYYCARSGIAAAGSKVIYYYDMDVWGQGTTVTVSS

SEQ ID NO: 2385 - protein, 5 aa, Human
RYGMH

SEQ ID NO: 2386 - protein, 17 aa, Human
WINAGNGNTKYSQKFQG

SEQ ID NO: 2387 - protein, 18 aa, Human
SGIAAAGSKVIYYYDMDV

SEQ ID NO: 2388 - protein, 30 aa, Human; identical to SEQ ID NO: 222

SEQ ID NO: 2389 - protein, 14 aa, Human
WVRQAPGQRLKWMG

SEQ ID NO: 2390 - protein, 32 aa, Human
RLTISRDTSASTAYMEVSSLRSEDTAVYYCAR

SEQ ID NO: 2391 - protein, 11 aa, Human
WGQGTTVTVSS

SEQ ID NO: 2392 - protein, 188 aa, Human
EIVLTQSPGTLSLSPGERATLSCRASQRVSSSYIAWYQQKPGQAPRLLIFGTSSRATGIPDRFSGSGSGTDFTLTISRLEPEDFALYYCQQYGSSPYTFGQGTKLEIKRTVAAPSVFIFPPSDEQLKSGTASVVCLLNNFYPREAKVQWKVDNALQSGNSQESVTEQDSKDSTYSLSSTLTLSKADYE

SEQ ID NO: 2393 - protein, 108 aa, Human
EIVLTQSPGTLSLSPGERATLSCRASQRVSSSYIAWYQQKPGQAPRLLIFGTSSRATGIPDRFSGSGSGTDFTLTISRLEPEDFALYYCQQYGSSPYTFGQGTKLEIK

SEQ ID NO: 2394 - protein, 12 aa, Human
RASQRVSSSYIA

SEQ ID NO: 2395 - protein, 7 aa, Human
GTSSRAT

SEQ ID NO: 2396 - protein, 9 aa, Human
QQYGSSPYT

SEQ ID NO: 2397 - protein, 23 aa, Human
EIVLTQSPGTLSLSPGERATLSC

SEQ ID NO: 2398 - protein, 15 aa, Human
WYQQKPGQAPRLLIF

SEQ ID NO: 2399 - protein, 32 aa, Human
GIPDRFSGSGSGTDFTLTISRLEPEDFALYYC

SEQ ID NO: 2400 - protein, 10 aa, Human
FGQGTKLEIK

SEQ ID NO: 2401 - protein, 178 aa, Human
QVQLVQSGAEVKMPGASVIVSCKASGYTFSTYYIHWVRQAPGQGLEWMGRITPRDGDTTYAQVLQGRVTLTRDTSASTAYMELSSLTYEDTAVYYCARDGHHWDFDFWGRGTLVAVSSASTKGPSVFPLAPCSRSTSESTAALGCLVKDYFPEPVTVSWNSGALTSGVHTFPAVLQSS

SEQ ID NO: 2402 - protein, 118 aa, Human
QVQLVQSGAEVKMPGASVIVSCKASGYTFSTYYIHWVRQAPGQGLEWMGRITPRDGDTTYAQVLQGRVTLTRDTSASTAYMELSSLTYEDTAVYYCARDGHHWDFDFWGRGTLVAVSS

SEQ ID NO: 2403 - protein, 5 aa, Human
TYYIH

SEQ ID NO: 2404 - protein, 17 aa, Human
RITPRDGDTTYAQVLQG

SEQ ID NO: 2405 - protein, 9 aa, Human
DGHHWDFDF

SEQ ID NO: 2406 - protein, 30 aa, Human
QVQLVQSGAEVKMPGASVIVSCKASGYTFS

SEQ ID NO: 2407 - protein, 14 aa, Human
WVRQAPGQGLEWMG

SEQ ID NO: 2408 - protein, 32 aa, Human
RVTLTRDTSASTAYMELSSLTYEDTAVYYCAR

SEQ ID NO: 2409 - protein, 11 aa, Human
WGRGTLVAVSS

SEQ ID NO: 2410 - protein, 180 aa, Human
HSALTQPPSASGSPGQSVTISCTGTSSDVGGYNHVSWYQQHPGKAPKLMVYEVNQRPSGVPDRFTGSKSGNTASLTVSGLQAEDEADYYCNSYTDRNKWVFGGGTRLTVLGQPKAAPSVTLFPPSSEELQANKATLVCLISDFYPGAVTVAWKADSSPVKAGVETTTPSKQSNNKYAASS

SEQ ID NO: 2411 - protein, 110 aa, Human
HSALTQPPSASGSPGQSVTISCTGTSSDVGGYNHVSWYQQHPGKAPKLMVYEVNQRPSGVPDRFTGSKSGNTASLTVSGLQAEDEADYYCNSYTDRNKWVFGGGTRLTVL

SEQ ID NO: 2412 - protein, 14 aa, Human
TGTSSDVGGYNHVS

SEQ ID NO: 2413 - protein, 7 aa, Human
EVNQRPS

SEQ ID NO: 2414 - protein, 10 aa, Human
NSYTDRNKWV

SEQ ID NO: 2415 - protein, 22 aa, Human
HSALTQPPSASGSPGQSVTISC

SEQ ID NO: 2416 - protein, 15 aa, Human
WYQQHPGKAPKLMVY

SEQ ID NO: 2417 - protein, 32 aa, Human
GVPDRFTGSKSGNTASLTVSGLQAEDEADYYC

SEQ ID NO: 2418 - protein, 10 aa, Human
FGGGTRLTVL

SEQ ID NO: 2419 - protein, 171 aa, Human
QVQLKQSGAEVKEPGGSVKLSCKASGYTFTSRYIHWVRQAPGQGLEWVGRLIPSDGGTTYAQKFRGRVTMTSDTSATTAYMELSSLGSGDTAVYYCARDGTHWDFDFWGQGTLVTVSSASPTSPKVFPLSLDSTPQDGNVVVACLVQGFFPQEPLSVTWSESGQNVTARNF

SEQ ID NO: 2420 - protein, 118 aa, Human
QVQLKQSGAEVKEPGGSVKLSCKASGYTFTSRYIHWVRQAPGQGLEWVGRLIPSDGGTTYAQKFRGRVTMTSDTSATTAYMELSSLGSGDTAVYYCARDGTHWDFDFWGQGTLVTVSS

SEQ ID NO: 2421 - protein, 5 aa, Human
SRYIH

SEQ ID NO: 2422 - protein, 17 aa, Human
RLIPSDGGTTYAQKFRG

SEQ ID NO: 2423 - protein, 9 aa, Human
DGTHWDFDF

SEQ ID NO: 2424 - protein, 30 aa, Human
QVQLKQSGAEVKEPGGSVKLSCKASGYTFT

SEQ ID NO: 2425 - protein, 14 aa, Human
WVRQAPGQGLEWVG

SEQ ID NO: 2426 - protein, 32 aa, Human
RVTMTSDTSATTAYMELSSLGSGDTAVYYCAR

SEQ ID NO: 2427 - protein, 11 aa, Human
WGQGTLVTVSS

SEQ ID NO: 2428 - protein, 180 aa, Human
HSALTQPPSASGSPGQSVTISCTGTSDDVGGYNHVSWYQQHPGKAPKLVIYEVTERPSGVPDRFTGSKSGNTASLTVSGLQAEDEADYYCNSYKRGNTWVFGGGTRLTVLGQPKAAPSVTLFPPSSEELQANKATLVCLISDFYPGAVTVAWKADSSPVKAGVETTTPSKQSNNKYAASS

SEQ ID NO: 2429 - protein, 110 aa, Human
HSALTQPPSASGSPGQSVTISCTGTSDDVGGYNHVSWYQQHPGKAPKLVIYEVTERPSGVPDRFTGSKSGNTASLTVSGLQAEDEADYYCNSYKRGNTWVFGGGTRLTVL

SEQ ID NO: 2430 - protein, 14 aa, Human
TGTSDDVGGYNHVS

SEQ ID NO: 2431 - protein, 7 aa, Human
EVTERPS

SEQ ID NO: 2432 - protein, 10 aa, Human
NSYKRGNTWV

SEQ ID NO: 2433 - protein, 22 aa, Human
HSALTQPPSASGSPGQSVTISC

SEQ ID NO: 2434 - protein, 15 aa, Human
WYQQHPGKAPKLVIY

SEQ ID NO: 2435 - protein, 32 aa, Human; identical to SEQ ID NO: 2417

SEQ ID NO: 2436 - protein, 10 aa, Human
FGGGTRLTVL

SEQ ID NO: 2437 - protein, 143 aa, Human; identical to SEQ ID NO: 649

SEQ ID NO: 2438 - protein, 119 aa, Human; identical to SEQ ID NO: 650

SEQ ID NO: 2439 - protein, 7 aa, Human
TSGVGVG

SEQ ID NO: 2440 - protein, 16 aa, Human
LIYWDDDKRYSPSLKS

SEQ ID NO: 2441 - protein, 9 aa, Human
HTIVPIFDY

SEQ ID NO: 2442 - protein, 30 aa, Human; identical to SEQ ID NO: 654

SEQ ID NO: 2443 - protein, 14 aa, Human
WIRQPPGKALEWLA

SEQ ID NO: 2444 - protein, 32 aa, Human; identical to SEQ ID NO: 656

SEQ ID NO: 2445 - protein, 11 aa, Human
WGQGTLVTVSS

SEQ ID NO: 2446 - protein, 186 aa, Human; identical to SEQ ID NO: 658

SEQ ID NO: 2447 - protein, 111 aa, Human; identical to SEQ ID NO: 659

SEQ ID NO: 2448 - protein, 14 aa, Human
TGTSSDVGGYNYVS

SEQ ID NO: 2449 - protein, 7 aa, Human
DVSNRPS

SEQ ID NO: 2450 - protein, 11 aa, Human
NSYTSSSTLVV

SEQ ID NO: 2451 - protein, 22 aa, Human
QSALTQPASVSGSPGQSITISC

SEQ ID NO: 2452 - protein, 15 aa, Human
WYQQHPGKAPKLMIY

SEQ ID NO: 2453 - protein, 32 aa, Human; identical to SEQ ID NO: 71

SEQ ID NO: 2454 - protein, 10 aa, Human
FGGGTKLTVL

SEQ ID NO: 2455 - protein, 178 aa, Human
QVQLQESGPGLVKPSGTLSLTCSVSGGSINSSFWSWIRQPPGKGLEWIGYIYYRGSTNYNPSLKSRVTISVDTSNNQFSLKLTSMTAADSAVYYCARETRYNWFDSWGQGTRVTVSSASTKGPSVFPLAPCSRSTSESTAALGCLVKDYFPEPVTVSWNSGALTSGVHTFPAVLQSSG

SEQ ID NO: 2456 - protein, 117 aa, Human
QVQLQESGPGLVKPSGTLSLTCSVSGGSINSSFWSWIRQPPGKGLEWIGYIYYRGSTNYNPSLKSRVTISVDTSNNQFSLKLTSMTAADSAVYYCARETRYNWFDSWGQGTRVTVSS

SEQ ID NO: 2457 - protein, 5 aa, Human
SSFWS

SEQ ID NO: 2458 - protein, 16 aa, Human
YIYYRGSTNYNPSLKS

SEQ ID NO: 2459 - protein, 9 aa, Human
ETRYNWFDS

SEQ ID NO: 2460 - protein, 30 aa, Human
QVQLQESGPGLVKPSGTLSLTCSVSGGSIN

SEQ ID NO: 2461 - protein, 14 aa, Human
WIRQPPGKGLEWIG

SEQ ID NO: 2462 - protein, 32 aa, Human
RVTISVDTSNNQFSLKLTSMTAADSAVYYCAR

SEQ ID NO: 2463 - protein, 11 aa, Human
WGQGTRVTVSS

SEQ ID NO: 2464 - protein, 158 aa, Human
DIVMTQSPDSLAVSLGERATINCKSSQTVSYTSNNKNYLAWYQQKPGQPPNLLIYWASTRESGVPDRFSGSGSGTDFTLTINSLQAEDVAVYYCQQYYTTPWTFGQGTKVEIKRTVAAPSVFIFPPSDEQLKSGTASVVCLLNNFYPREAKVQWKVDN

SEQ ID NO: 2465 - protein, 113 aa, Human
DIVMTQSPDSLAVSLGERATINCKSSQTVSYTSNNKNYLAWYQQKPGQPPNLLIYWASTRESGVPDRFSGSGSGTDFTLTINSLQAEDVAVYYCQQYYTTPWTFGQGTKVEIK

SEQ ID NO: 2466 - protein, 17 aa, Human
KSSQTVSYTSNNKNYLA

SEQ ID NO: 2467 - protein, 7 aa, Human
WASTRES

SEQ ID NO: 2468 - protein, 9 aa, Human
QQYYTTPWT

SEQ ID NO: 2469 - protein, 23 aa, Human
DIVMTQSPDSLAVSLGERATINC

SEQ ID NO: 2470 - protein, 15 aa, Human
WYQQKPGQPPNLLIY

SEQ ID NO: 2471 - protein, 32 aa, Human
GVPDRFSGSGSGTDFTLTINSLQAEDVAVYYC

SEQ ID NO: 2472 - protein, 10 aa, Human
FGQGTKVEIK

SEQ ID NO: 2473 - protein, 188 aa, Human
QVQLVQSGAEVKKPGASVKVSCKVSGYTLTELSMHWVRQAPGKGLEWMGGFDPEDAETIYAQKFQGRVTMTEDTSTDTAYMELSSLRSEDTAVYYCATGGFPVNSLYDILTGYLDYWGQGTLVTVSSASTKGPSVFPLAPCSRSTSESTAALGCLVKDYFPEPVTVSWNSGALTSGVHTFPAVLQSSG

SEQ ID NO: 2474 - protein, 127 aa, Human
QVQLVQSGAEVKKPGASVKVSCKVSGYTLTELSMHWVRQAPGKGLEWMGGFDPEDAETIYAQKFQGRVTMTEDTSTDTAYMELSSLRSEDTAVYYCATGGFPVNSLYDILTGYLDYWGQGTLVTVSS

SEQ ID NO: 2475 - protein, 5 aa, Human
ELSMH

SEQ ID NO: 2476 - protein, 17 aa, Human
GFDPEDAETIYAQKFQG

SEQ ID NO: 2477 - protein, 18 aa, Human
GGFPVNSLYDILTGYLDY

SEQ ID NO: 2478 - protein, 30 aa, Human
QVQLVQSGAEVKKPGASVKVSCKVSGYTLT

SEQ ID NO: 2479 - protein, 14 aa, Human
WVRQAPGKGLEWMG

SEQ ID NO: 2480 - protein, 32 aa, Human
RVTMTEDTSTDTAYMELSSLRSEDTAVYYCAT

SEQ ID NO: 2481 - protein, 11 aa, Human
WGQGTLVTVSS

SEQ ID NO: 2482 - protein, 152 aa, Human
EIVMTQSPATLSVSPGERATLSCRASQNVSSNLAWYQQKPGQAPRLLIYGASTRATGIPARFSGSGSGTEFTLTISSLQSEDFAVYYCQQYNNWPHTFGPGTKVDIKRTVAAPSVFIFPPSDEQLKSGTASVVCLLNNFYPREAKVQWKVDN

SEQ ID NO: 2483 - protein, 107 aa, Human
EIVMTQSPATLSVSPGERATLSCRASQNVSSNLAWYQQKPGQAPRLLIYGASTRATGIPARFSGSGSGTEFTLTISSLQSEDFAVYYCQQYNNWPHTFGPGTKVDIK

SEQ ID NO: 2484 - protein, 11 aa, Human
RASQNVSSNLA

SEQ ID NO: 2485 - protein, 7 aa, Human
GASTRAT

SEQ ID NO: 2486 - protein, 9 aa, Human
QQYNNWPHT

SEQ ID NO: 2487 - protein, 23 aa, Human
EIVMTQSPATLSVSPGERATLSC

SEQ ID NO: 2488 - protein, 15 aa, Human
WYQQKPGQAPRLLIY

SEQ ID NO: 2489 - protein, 32 aa, Human; identical to SEQ ID NO: 251

SEQ ID NO: 2490 - protein, 10 aa, Human
FGPGTKVDIK

SEQ ID NO: 2491 - protein, 166 aa, Human
QVQLVESGGGVVQPGRSLRLSCAASGFTFRNFGMHWVRQAPGKGLEWVAFIWTAESDKFYADSVKGRFTVSRDNSKNTLYLEMNSLRAEDTAVYYCTKAMDVWGRGTTVTVSSASPTSPKVFPLSLCSTQPDGNVVIACLVQGFFPQEPLSVTWSESGQGVTARNF

SEQ ID NO: 2492 - protein, 113 aa, Human
QVQLVESGGGVVQPGRSLRLSCAASGFTFRNFGMHWVRQAPGKGLEWVAFIWTAESDKFYADSVKGRFTVSRDNSKNTLYLEMNSLRAEDTAVYYCTKAMDVWGRGTTVTVSS

SEQ ID NO: 2493 - protein, 5 aa, Human
NFGMH

SEQ ID NO: 2494 - protein, 17 aa, Human
FIWTAESDKFYADSVKG

SEQ ID NO: 2495 - protein, 4 aa, Human
AMDV

SEQ ID NO: 2496 - protein, 30 aa, Human; identical to SEQ ID NO: 2136

SEQ ID NO: 2497 - protein, 14 aa, Human
WVRQAPGKGLEWVA

SEQ ID NO: 2498 - protein, 32 aa, Human
RFTVSRDNSKNTLYLEMNSLRAEDTAVYYCTK

SEQ ID NO: 2499 - protein, 11 aa, Human
WGRGTTVTVSS

SEQ ID NO: 2500 - protein, 152 aa, Human
EIVLTQSPATLSLSPGERATLSCRASQSVSTSLAWYQQKCGQAPRLLIYDASNRATGIPARFSGSGSGTDFTLTISSLEPEDFAVYYCQQRGNWPFTFGPGTRVDIKRTVAAPSVFIFPPSDEQLKSGTASVVCLLNNFYPREAKVQWKVDN

SEQ ID NO: 2501 - protein, 107 aa, Human
EIVLTQSPATLSLSPGERATLSCRASQSVSTSLAWYQQKCGQAPRLLIYDASNRATGIPARFSGSGSGTDFTLTISSLEPEDFAVYYCQQRGNWPFTFGPGTRVDIK

SEQ ID NO: 2502 - protein, 11 aa, Human
RASQSVSTSLA

SEQ ID NO: 2503 - protein, 7 aa, Human
DASNRAT

SEQ ID NO: 2504 - protein, 9 aa, Human
QQRGNWPFT

SEQ ID NO: 2505 - protein, 23 aa, Human
EIVLTQSPATLSLSPGERATLSC

SEQ ID NO: 2506 - protein, 15 aa, Human
WYQQKCGQAPRLLIY

SEQ ID NO: 2507 - protein, 32 aa, Human; identical to SEQ ID NO: 215

SEQ ID NO: 2508 - protein, 10 aa, Human
FGPGTRVDIK

SEQ ID NO: 2509 - protein, 149 aa, Human
QVQLVQSGAEVKKPGASVKVSCKVSGYTLTELSMHWVRQAPGKGLEWMGGFDPEDGETIYAQKFQGRVTMTEDTSTDTAYMELSSLRSEDTAVYYCATGGLGCSNGVCNNWFDPWGLGTLVTVSSGSASAPTLFPLVSCENSPSDTSSV

SEQ ID NO: 2510 - protein, 125 aa, Human
QVQLVQSGAEVKKPGASVKVSCKVSGYTLTELSMHWVRQAPGKGLEWMGGFDPEDGETIYAQKFQGRVTMTEDTSTDTAYMELSSLRSEDTAVYYCATGGLGCSNGVCNNWFDPWGLGTLVTVSS

SEQ ID NO: 2511 - protein, 5 aa, Human
ELSMH

SEQ ID NO: 2512 - protein, 17 aa, Human
GFDPEDGETIYAQKFQG

SEQ ID NO: 2513 - protein, 16 aa, Human
GGLGCSNGVCNNWFDP

SEQ ID NO: 2514 - protein, 30 aa, Human; identical to SEQ ID NO: 2478

SEQ ID NO: 2515 - protein, 14 aa, Human
WVRQAPGKGLEWMG

SEQ ID NO: 2516 - protein, 32 aa, Human; identical to SEQ ID NO: 2480

SEQ ID NO: 2517 - protein, 11 aa, Human
WGLGTLVTVSS

SEQ ID NO: 2518 - protein, 168 aa, Human
EIVMTQSPATLSVSPGERATLSCRASQSITSNLAWYQQKPGQAPRLLIYGASTRATGIPARFSGSGSGTEFTLTISNLQSEDFAVYYCQQYNNWPLTFGQGTKVEIKRTVAAPSVFIFPPSDEQLKSGTASVVCLLNNFYPREAKVQWKVDNALQSGNSQESVTEQDS

SEQ ID NO: 2519 - protein, 107 aa, Human
EIVMTQSPATLSVSPGERATLSCRASQSITSNLAWYQQKPGQAPRLLIYGASTRATGIPARFSGSGSGTEFTLTISNLQSEDFAVYYCQQYNNWPLTFGQGTKVEIK

SEQ ID NO: 2520 - protein, 11 aa, Human
RASQSITSNLA

SEQ ID NO: 2521 - protein, 7 aa, Human
GASTRAT

SEQ ID NO: 2522 - protein, 9 aa, Human
QQYNNWPLT

SEQ ID NO: 2523 - protein, 23 aa, Human
EIVMTQSPATLSVSPGERATLSC

SEQ ID NO: 2524 - protein, 15 aa, Human
WYQQKPGQAPRLLIY

SEQ ID NO: 2525 - protein, 32 aa, Human
GIPARFSGSGSGTEFTLTISNLQSEDFAVYYC

SEQ ID NO: 2526 - protein, 10 aa, Human
FGQGTKVEIK

SEQ ID NO: 2527 - protein, 144 aa, Human
EVQLVESGGGLVQPGGSLRLSCAASGFTFSSYWMSWVRQAPGKGLEWVANIKQDGSEKYYVDSVKGRFTISRDNAKNSLYLQMNSLRAEDTAVYYCARDSIAVAGGFDYWGQGTLVTVSSGSASAPTLFPLVSCENSPSDTSSV

SEQ ID NO: 2528 - protein, 120 aa, Human
EVQLVESGGGLVQPGGSLRLSCAASGFTFSSYWMSWVRQAPGKGLEWVANIKQDGSEKYYVDSVKGRFTISRDNAKNSLYLQMNSLRAEDTAVYYCARDSIAVAGGFDYWGQGTLVTVSS

SEQ ID NO: 2529 - protein, 5 aa, Human
SYWMS

SEQ ID NO: 2530 - protein, 17 aa, Human
NIKQDGSEKYYVDSVKG

SEQ ID NO: 2531 - protein, 11 aa, Human
DSIAVAGGFDY

SEQ ID NO: 2532 - protein, 30 aa, Human; identical to SEQ ID NO: 870

SEQ ID NO: 2533 - protein, 14 aa, Human
WVRQAPGKGLEWVA

SEQ ID NO: 2534 - protein, 32 aa, Human; identical to SEQ ID NO: 332

SEQ ID NO: 2535 - protein, 11 aa, Human
WGQGTLVTVSS

SEQ ID NO: 2536 - protein, 189 aa, Human
SYELTQPPSVSVSPGQTASITCSGDKLGDKYACWYQQKPGQSPVLVIYQDSKRPSGIPERFSGSNSGNTATLTISGTQAMDEADYYCQAWDSSTNVVFGGGTKLTVLGQPKAAPSVTLFPPSSEELQANKATLVCLISDFYPGAVTVAWKADSSPVKAGVETTTPSKQSNNKYAASSYLSLTPEQWKSH

SEQ ID NO: 2537 - protein, 107 aa, Human
SYELTQPPSVSVSPGQTASITCSGDKLGDKYACWYQQKPGQSPVLVIYQDSKRPSGIPERFSGSNSGNTATLTISGTQAMDEADYYCQAWDSSTNVVFGGGTKLTVL

SEQ ID NO: 2538 - protein, 11 aa, Human
SGDKLGDKYAC

SEQ ID NO: 2539 - protein, 7 aa, Human
QDSKRPS

SEQ ID NO: 2540 - protein, 10 aa, Human
QAWDSSTNVV

SEQ ID NO: 2541 - protein, 22 aa, Human
SYELTQPPSVSVSPGQTASITC

SEQ ID NO: 2542 - protein, 15 aa, Human
WYQQKPGQSPVLVIY

SEQ ID NO: 2543 - protein, 32 aa, Human; identical to SEQ ID NO: 467

SEQ ID NO: 2544 - protein, 10 aa, Human
FGGGTKLTVL

SEQ ID NO: 2545 - protein, 144 aa, Human
QVQLVESGGGVVQPGRSLRLSCAASGFTFSSYGMHWVRQAPGKGLEWVAVIWYDGSNKYYADSVKGRFTISRDNSKNTLYLQMNSLRAEDTAVYYCARMRPEYSSGFDPWGQGTLVTVSSGSASAPTLFPLVSCENSPSDTSSV

SEQ ID NO: 2546 - protein, 120 aa, Human
QVQLVESGGGVVQPGRSLRLSCAASGFTFSSYGMHWVRQAPGKGLEWVAVIWYDGSNKYYADSVKGRFTISRDNSKNTLYLQMNSLRAEDTAVYYCARMRPEYSSGFDPWGQGTLVTVSS

SEQ ID NO: 2547 - protein, 5 aa, Human
SYGMH

SEQ ID NO: 2548 - protein, 17 aa, Human
VIWYDGSNKYYADSVKG

SEQ ID NO: 2549 - protein, 11 aa, Human
MRPEYSSGFDP

SEQ ID NO: 2550 - protein, 30 aa, Human; identical to SEQ ID NO: 168

SEQ ID NO: 2551 - protein, 14 aa, Human
WVRQAPGKGLEWVA

SEQ ID NO: 2552 - protein, 32 aa, Human; identical to SEQ ID NO: 170

SEQ ID NO: 2553 - protein, 11 aa, Human
WGQGTLVTVSS

SEQ ID NO: 2554 - protein, 190 aa, Human
QSALTQPRSVSGSPGQSVTISCTGSSSDVGRYNYVSWYQQHPGKAPKLMTYDVTRRPSGVPARFSGSKSDNTASLTISGLQAEDEADYYCCSFAGSYTVFGGGTKLTVLGQPKAAPSVTLFPPSSEELQANKATLVCLISDFYPGAVTVAWKADGSPVKVGVETTKPSKQSNNKYAASSYLSLTPEQWKS

SEQ ID NO: 2555 - protein, 109 aa, Human
QSALTQPRSVSGSPGQSVTISCTGSSSDVGRYNYVSWYQQHPGKAPKLMTYDVTRRPSGVPARFSGSKSDNTASLTISGLQAEDEADYYCCSFAGSYTVFGGGTKLTVL

SEQ ID NO: 2556 - protein, 14 aa, Human
TGSSSDVGRYNYVS

SEQ ID NO: 2557 - protein, 7 aa, Human
DVTRRPS

SEQ ID NO: 2558 - protein, 9 aa, Human
CSFAGSYTV

SEQ ID NO: 2559 - protein, 22 aa, Human
QSALTQPRSVSGSPGQSVTISC

SEQ ID NO: 2560 - protein, 15 aa, Human
WYQQHPGKAPKLMTY

SEQ ID NO: 2561 - protein, 32 aa, Human
GVPARFSGSKSDNTASLTISGLQAEDEADYYC

SEQ ID NO: 2562 - protein, 10 aa, Human
FGGGTKLTVL

SEQ ID NO: 2563 - protein, 171 aa, Human
QVQLVQSGTEVREPGASVKVSCKASGYTFTGYYVHWVRQAPGQGLEWMGWVNPGSGDTLYAQKFQGRFTLTRDMSITTAYMELSSLRSDDSAVYFCFRGYSYATFDYWGQGTLVTVSSASPTSPKVFPLSLCSTQPDGNVVIACLVQGFFPQEPLSVTWSESGQGVTARNF

SEQ ID NO: 2564 - protein, 118 aa, Human
QVQLVQSGTEVREPGASVKVSCKASGYTFTGYYVHWVRQAPGQGLEWMGWVNPGSGDTLYAQKFQGRFTLTRDMSITTAYMELSSLRSDDSAVYFCFRGYSYATFDYWGQGTLVTVSS

SEQ ID NO: 2565 - protein, 5 aa, Human
GYYVH

SEQ ID NO: 2566 - protein, 17 aa, Human
WVNPGSGDTLYAQKFQG

SEQ ID NO: 2567 - protein, 9 aa, Human
GYSYATFDY

SEQ ID NO: 2568 - protein, 30 aa, Human
QVQLVQSGTEVREPGASVKVSCKASGYTFT

SEQ ID NO: 2569 - protein, 14 aa, Human
WVRQAPGQGLEWMG

SEQ ID NO: 2570 - protein, 32 aa, Human
RFTLTRDMSITTAYMELSSLRSDDSAVYFCFR

SEQ ID NO: 2571 - protein, 11 aa, Human
WGQGTLVTVSS

SEQ ID NO: 2572 - protein, 183 aa, Human
QSVLTQPPSVSGAPGQRVTISCTGSSSNIGAGYDVHWYQQLPGTAPKLLIYGNSNRPSGVPDRFSGSKSGTSASLAITGLQAEDEADYYCQSYDSSLSGSFYVFGTGTKVTVLGQPKANPTVTLFPPSSEELQANKATLVCLISDFYPGAVTVAWKADSSPVKAGVETTTPSKQSNNKYAASS

SEQ ID NO: 2573 - protein, 113 aa, Human
QSVLTQPPSVSGAPGQRVTISCTGSSSNIGAGYDVHWYQQLPGTAPKLLIYGNSNRPSGVPDRFSGSKSGTSASLAITGLQAEDEADYYCQSYDSSLSGSFYVFGTGTKVTVL

SEQ ID NO: 2574 - protein, 14 aa, Human
TGSSSNIGAGYDVH

SEQ ID NO: 2575 - protein, 7 aa, Human
GNSNRPS

SEQ ID NO: 2576 - protein, 13 aa, Human
QSYDSSLSGSFYV

SEQ ID NO: 2577 - protein, 22 aa, Human
QSVLTQPPSVSGAPGQRVTISC

SEQ ID NO: 2578 - protein, 15 aa, Human
WYQQLPGTAPKLLIY

SEQ ID NO: 2579 - protein, 32 aa, Human; identical to SEQ ID NO: 755

SEQ ID NO: 2580 - protein, 10 aa, Human
FGTGTKVTVL

SEQ ID NO: 2581 - protein, 180 aa, Human
QVQLVESGGGVVQPGRSLRLSCAVSGFTFSSYAMHWVRQAPGKGLEWVAVISYDGSNKYFADSVKGRFTISRDNSKNTLYLQMNSLRAEDTAVYYCARGRGNYFTYFDYWGQGTLVTVSSASTKGPSVFPLAPSSKSTSGGTAALGCLVKDYFPEPVTVSWNSGALTSGVHTFPAVLQSS

SEQ ID NO: 2582 - protein, 120 aa, Human
QVQLVESGGGVVQPGRSLRLSCAVSGFTFSSYAMHWVRQAPGKGLEWVAVISYDGSNKYFADSVKGRFTISRDNSKNTLYLQMNSLRAEDTAVYYCARGRGNYFTYFDYWGQGTLVTVSS

SEQ ID NO: 2583 - protein, 5 aa, Human
SYAMH

SEQ ID NO: 2584 - protein, 17 aa, Human
VISYDGSNKYFADSVKG

SEQ ID NO: 2585 - protein, 11 aa, Human
GRGNYFTYFDY

SEQ ID NO: 2586 - protein, 30 aa, Human
QVQLVESGGGVVQPGRSLRLSCAVSGFTFS

SEQ ID NO: 2587 - protein, 14 aa, Human
WVRQAPGKGLEWVA

SEQ ID NO: 2588 - protein, 32 aa, Human; identical to SEQ ID NO: 170

SEQ ID NO: 2589 - protein, 11 aa, Human
WGQGTLVTVSS

SEQ ID NO: 2590 - protein, 152 aa, Human
EIVLTQSPGTLSLSPGERATLSCRASQSVSRNYLAWYQQKPGQAPRLLIYSASSRATGIPDRFSGSGSGTDFTLTISRLEPEDFAVYYCQQYGGSLTFGGGTKVEIKRTVAAPSVFIFPPSDEQLKSGTASVVCLLNNFYPREAKVQWKVDN

SEQ ID NO: 2591 - protein, 107 aa, Human
EIVLTQSPGTLSLSPGERATLSCRASQSVSRNYLAWYQQKPGQAPRLLIYSASSRATGIPDRFSGSGSGTDFTLTISRLEPEDFAVYYCQQYGGSLTFGGGTKVEIK

SEQ ID NO: 2592 - protein, 12 aa, Human
RASQSVSRNYLA

SEQ ID NO: 2593 - protein, 7 aa, Human
SASSRAT

SEQ ID NO: 2594 - protein, 8 aa, Human
QQYGGSLT

SEQ ID NO: 2595 - protein, 23 aa, Human
EIVLTQSPGTLSLSPGERATLSC

SEQ ID NO: 2596 - protein, 15 aa, Human
WYQQKPGQAPRLLIY

SEQ ID NO: 2597 - protein, 32 aa, Human; identical to SEQ ID NO: 233

SEQ ID NO: 2598 - protein, 10 aa, Human
FGGGTKVEIK

SEQ ID NO: 2599 - protein, 147 aa, Human
QVQLVESGGGVVQPGRSLRLSCAASGFTFSSYGMHWVRQAPGKGLEWVAVISYDGSNKYYADSVKGRFTISRDNSKNTLYLQMNSLRAEDTAVYYCAKEGGSYSYYYYGMDVWGQGTTVTVSSGSASAPTLFPLVSCENSPSDTSSV

SEQ ID NO: 2600 - protein, 123 aa, Human
QVQLVESGGGVVQPGRSLRLSCAASGFTFSSYGMHWVRQAPGKGLEWVAVISYDGSNKYYADSVKGRFTISRDNSKNTLYLQMNSLRAEDTAVYYCAKEGGSYSYYYYGMDVWGQGTTVTVSS

SEQ ID NO: 2601 - protein, 5 aa, Human
SYGMH

SEQ ID NO: 2602 - protein, 17 aa, Human
VISYDGSNKYYADSVKG

SEQ ID NO: 2603 - protein, 14 aa, Human
EGGSYSYYYYGMDV

SEQ ID NO: 2604 - protein, 30 aa, Human; identical to SEQ ID NO: 168

SEQ ID NO: 2605 - protein, 14 aa, Human
WVRQAPGKGLEWVA

SEQ ID NO: 2606 - protein, 32 aa, Human; identical to SEQ ID NO: 692

SEQ ID NO: 2607 - protein, 11 aa, Human
WGQGTTVTVSS

SEQ ID NO: 2608 - protein, 152 aa, Human
DIQMTQSPSSLSASVGDRVTITCRASQGISNYLAWYQQKPGKVPKLLIYAASTLQSGVPSRFSGSGSGTDFTLTISSLQPEDVATYYCQKYNSAPRTFGPGTKVDIKRTVAAPSVFIFPPSDEQLKSGTASVVCLLNNFYPREAKVQWKVDN

SEQ ID NO: 2609 - protein, 107 aa, Human
DIQMTQSPSSLSASVGDRVTITCRASQGISNYLAWYQQKPGKVPKLLIYAASTLQSGVPSRFSGSGSGTDFTLTISSLQPEDVATYYCQKYNSAPRTFGPGTKVDIK

SEQ ID NO: 2610 - protein, 11 aa, Human
RASQGISNYLA

SEQ ID NO: 2611 - protein, 7 aa, Human
AASTLQS

SEQ ID NO: 2612 - protein, 9 aa, Human
QKYNSAPRT

SEQ ID NO: 2613 - protein, 23 aa, Human
DIQMTQSPSSLSASVGDRVTITC

SEQ ID NO: 2614 - protein, 15 aa, Human
WYQQKPGKVPKLLIY

SEQ ID NO: 2615 - protein, 32 aa, Human
GVPSRFSGSGSGTDFTLTISSLQPEDVATYYC

SEQ ID NO: 2616 - protein, 10 aa, Human
FGPGTKVDIK

SEQ ID NO: 2617 - protein, 145 aa, Human
EVQLVESGGGLVQPGGSLRLSCVVSGFTFSRYWMSWVRQTPGKGLQWVANIKQDDTNKFYEDSVKGRFTTSRDNAKNSLYLQMNSLRAEDTAVYYCARGGGSSSGLYFESWGQGTLVIVSSGSASAPTLFPLVSCENSPSDTSSV

SEQ ID NO: 2618 - protein, 121 aa, Human
EVQLVESGGGLVQPGGSLRLSCVVSGFTFSRYWMSWVRQTPGKGLQWVANIKQDDTNKFYEDSVKGRFTTSRDNAKNSLYLQMNSLRAEDTAVYYCARGGGSSSGLYFESWGQGTLVIVSS

SEQ ID NO: 2619 - protein, 5 aa, Human
RYWMS

SEQ ID NO: 2620 - protein, 17 aa, Human
NIKQDDTNKFYEDSVKG

SEQ ID NO: 2621 - protein, 12 aa, Human
GGGSSSGLYFES

SEQ ID NO: 2622 - protein, 30 aa, Human
EVQLVESGGGLVQPGGSLRLSCVVSGFTFS

SEQ ID NO: 2623 - protein, 14 aa, Human
WVRQTPGKGLQWVA

SEQ ID NO: 2624 - protein, 32 aa, Human
RFTTSRDNAKNSLYLQMNSLRAEDTAVYYCAR

SEQ ID NO: 2625 - protein, 11 aa, Human
WGQGTLVIVSS

SEQ ID NO: 2626 - protein, 145 aa, Human; identical to SEQ ID NO: 2617

SEQ ID NO: 2627 - protein, 121 aa, Human; identical to SEQ ID NO: 2618

SEQ ID NO: 2628 - protein, 5 aa, Human
RYWMS

SEQ ID NO: 2629 - protein, 17 aa, Human
NIKQDDTNKFYEDSVKG

SEQ ID NO: 2630 - protein, 12 aa, Human
GGGSSSGLYFES

SEQ ID NO: 2631 - protein, 30 aa, Human; identical to SEQ ID NO: 2622

SEQ ID NO: 2632 - protein, 14 aa, Human
WVRQTPGKGLQWVA

SEQ ID NO: 2633 - protein, 32 aa, Human; identical to SEQ ID NO: 2624

SEQ ID NO: 2634 - protein, 11 aa, Human
WGQGTLVIVSS

SEQ ID NO: 2635 - protein, 171 aa, Human
EVQLVESGGDLVQPGRSLRLSCTASAFNFGDYAMSWVRQAPGKGLEWVGFIRSKGYGGTTEYAASVKGRFTISRDDSNRIAYLQMNSLKSEDTAVYYCSRGYQLPNLWGQGTLVTVSSASPTSPKVFPLSLCSTQPDGNVVIACLVQGFFPQEPLSVTWSESGQGVTARNF

SEQ ID NO: 2636 - protein, 118 aa, Human
EVQLVESGGDLVQPGRSLRLSCTASAFNFGDYAMSWVRQAPGKGLEWVGFIRSKGYGGTTEYAASVKGRFTISRDDSNRIAYLQMNSLKSEDTAVYYCSRGYQLPNLWGQGTLVTVSS

SEQ ID NO: 2637 - protein, 5 aa, Human
DYAMS

SEQ ID NO: 2638 - protein, 19 aa, Human
FIRSKGYGGTTEYAASVKG

SEQ ID NO: 2639 - protein, 7 aa, Human
GYQLPNL

SEQ ID NO: 2640 - protein, 30 aa, Human
EVQLVESGGDLVQPGRSLRLSCTASAFNFG

SEQ ID NO: 2641 - protein, 14 aa, Human
WVRQAPGKGLEWVG

SEQ ID NO: 2642 - protein, 32 aa, Human
RFTISRDDSNRIAYLQMNSLKSEDTAVYYCSR

SEQ ID NO: 2643 - protein, 11 aa, Human
WGQGTLVTVSS

SEQ ID NO: 2644 - protein, 152 aa, Human
DIQMTQSPSSLSASVGDRVTITCRASQSISTFLNWYQQKPGKAPSLLIYAASSLQSGVPSRFSGSESGTDFTLTISSLQPEDFATYYCQQSYSTPLTFGGGTKVEIKRTVAAPSVFIFPPSDEQLKSGTASVVCLLNNFYPREAKVQWKVDN

SEQ ID NO: 2645 - protein, 107 aa, Human
DIQMTQSPSSLSASVGDRVTITCRASQSISTFLNWYQQKPGKAPSLLIYAASSLQSGVPSRFSGSESGTDFTLTISSLQPEDFATYYCQQSYSTPLTFGGGTKVEIK

SEQ ID NO: 2646 - protein, 11 aa, Human
RASQSISTFLN

SEQ ID NO: 2647 - protein, 7 aa, Human
AASSLQS

SEQ ID NO: 2648 - protein, 9 aa, Human
QQSYSTPLT

SEQ ID NO: 2649 - protein, 23 aa, Human
DIQMTQSPSSLSASVGDRVTITC

SEQ ID NO: 2650 - protein, 15 aa, Human
WYQQKPGKAPSLLIY

SEQ ID NO: 2651 - protein, 32 aa, Human
GVPSRFSGSESGTDFTLTISSLQPEDFATYYC

SEQ ID NO: 2652 - protein, 10 aa, Human
FGGGTKVEIK

SEQ ID NO: 2653 - protein, 182 aa, Human
EVHLVESGGGWVQPGGSLRLSCAASGFTLSTYWMSWVRQTPGEGLQWVANIKQDGSSKYYVDSVKGRFTISRDNAKNSVYLQMNSLRGEDTAVYYCARGDGSNSGIYFDSWGQGTLVTVSSASTKGPSVFPLAPCSRSTSESTAALGCLVKDYFPEPVTVSWNSGALTSGVHTFPAVLQSSG

SEQ ID NO: 2654 - protein, 121 aa, Human
EVHLVESGGGWVQPGGSLRLSCAASGFTLSTYWMSWVRQTPGEGLQWVANIKQDGSSKYYVDSVKGRFTISRDNAKNSVYLQMNSLRGEDTAVYYCARGDGSNSGIYFDSWGQGTLVTVSS

SEQ ID NO: 2655 - protein, 5 aa, Human
TYWMS

SEQ ID NO: 2656 - protein, 17 aa, Human
NIKQDGSSKYYVDSVKG

SEQ ID NO: 2657 - protein, 12 aa, Human
GDGSNSGIYFDS

SEQ ID NO: 2658 - protein, 30 aa, Human
EVHLVESGGGWVQPGGSLRLSCAASGFTLS

SEQ ID NO: 2659 - protein, 14 aa, Human
WVRQTPGEGLQWVA

SEQ ID NO: 2660 - protein, 32 aa, Human
RFTISRDNAKNSVYLQMNSLRGEDTAVYYCAR

SEQ ID NO: 2661 - protein, 11 aa, Human
WGQGTLVTVSS

SEQ ID NO: 2662 - protein, 186 aa, Human
EIVMTQSPATLSVSPGERATLSCRASQSISSKLAWYQQKPGQAPRLLIYGASTRATGIPARFSGSGSGTEFTLTISSMQSEDFAVYYCQQYNYWYTFGQGTKLEIKRTVAAPSVFIFPPSDEQLKSGTASVVCLLNNFYPREAKVQWKVDNALQSGNSQESVTEQDSKDSTYSLSSTLTLSKADYE

SEQ ID NO: 2663 - protein, 106 aa, Human
EIVMTQSPATLSVSPGERATLSCRASQSISSKLAWYQQKPGQAPRLLIYGASTRATGIPARFSGSGSGTEFTLTISSMQSEDFAVYYCQQYNYWYTFGQGTKLEIK

SEQ ID NO: 2664 - protein, 11 aa, Human
RASQSISSKLA

SEQ ID NO: 2665 - protein, 7 aa, Human
GASTRAT

SEQ ID NO: 2666 - protein, 8 aa, Human
QQYNYWYT

SEQ ID NO: 2667 - protein, 23 aa, Human
EIVMTQSPATLSVSPGERATLSC

SEQ ID NO: 2668 - protein, 15 aa, Human
WYQQKPGQAPRLLIY

SEQ ID NO: 2669 - protein, 32 aa, Human
GIPARFSGSGSGTEFTLTISSMQSEDFAVYYC

SEQ ID NO: 2670 - protein, 10 aa, Human
FGQGTKLEIK

SEQ ID NO: 2671 - protein, 148 aa, Human
EVQLVESGGGLVQPGGSLRLSCAASGFTFSSYEMNWVRQAPGKGLEWVSYISSSGSTIYYADSVKGRFTISRDNAKNSLYLQMNSLRAEDTAVYYCARDRRGDYGRYYYGMDVWGQGTTVTVSSGSASAPTLFPLVSCENSPSDTSSV

SEQ ID NO: 2672 - protein, 124 aa, Human
EVQLVESGGGLVQPGGSLRLSCAASGFTFSSYEMNWVRQAPGKGLEWVSYISSSGSTIYYADSVKGRFTISRDNAKNSLYLQMNSLRAEDTAVYYCARDRRGDYGRYYYGMDVWGQGTTVTVSS

SEQ ID NO: 2673 - protein, 5 aa, Human
SYEMN

SEQ ID NO: 2674 - protein, 17 aa, Human
YISSSGSTIYYADSVKG

SEQ ID NO: 2675 - protein, 15 aa, Human
DRRGDYGRYYYGMDV

SEQ ID NO: 2676 - protein, 30 aa, Human; identical to SEQ ID NO: 870

SEQ ID NO: 2677 - protein, 14 aa, Human
WVRQAPGKGLEWVS

SEQ ID NO: 2678 - protein, 32 aa, Human; identical to SEQ ID NO: 332

SEQ ID NO: 2679 - protein, 11 aa, Human
WGQGTTVTVSS

SEQ ID NO: 2680 - protein, 177 aa, Human
SSELTQDPAVSVALGQTVRITCQGDSLRSYYASWYQQKPGQAPVLVIYGKNNRPSGIPDRFSGSSSGNTASLTITGAQAEDEADYYCNSRDSSGNRVFGGGTKLTVLGQPKAAPSVTLFPPSSEELQANKATLVCLISDFYPGAVTVAWKADSSPVKAGVETTTPSKQSNNKYAASS

SEQ ID NO: 2681 - protein, 107 aa, Human
SSELTQDPAVSVALGQTVRITCQGDSLRSYYASWYQQKPGQAPVLVIYGKNNRPSGIPDRFSGSSSGNTASLTITGAQAEDEADYYCNSRDSSGNRVFGGGTKLTVL

SEQ ID NO: 2682 - protein, 11 aa, Human
QGDSLRSYYAS

SEQ ID NO: 2683 - protein, 7 aa, Human
GKNNRPS

SEQ ID NO: 2684 - protein, 10 aa, Human
NSRDSSGNRV

SEQ ID NO: 2685 - protein, 22 aa, Human
SSELTQDPAVSVALGQTVRITC

SEQ ID NO: 2686 - protein, 15 aa, Human
WYQQKPGQAPVLVIY

SEQ ID NO: 2687 - protein, 32 aa, Human; identical to SEQ ID NO: 1859

SEQ ID NO: 2688 - protein, 10 aa, Human
FGGGTKLTVL

SEQ ID NO: 2689 - protein, 144 aa, Human
EVQLVESGGGLVKPGGSLRLSCAASGFTFSSYSMNWVRQAPGKGLEWVSSISSSGTYIYYADSVKGRFTISRDNAKNSLYLQMNSLRVEDTAVYYCAQSIAARLDWFDPWGQGTLVTVSSGSASAPTLFPLVSCENSPSDTSSV

SEQ ID NO: 2690 - protein, 120 aa, Human
EVQLVESGGGLVKPGGSLRLSCAASGFTFSSYSMNWVRQAPGKGLEWVSSISSSGTYIYYADSVKGRFTISRDNAKNSLYLQMNSLRVEDTAVYYCAQSIAARLDWFDPWGQGTLVTVSS

SEQ ID NO: 2691 - protein, 5 aa, Human
SYSMN

SEQ ID NO: 2692 - protein, 17 aa, Human
SISSSGTYIYYADSVKG

SEQ ID NO: 2693 - protein, 11 aa, Human
SIAARLDWFDP

SEQ ID NO: 2694 - protein, 30 aa, Human; identical to SEQ ID NO: 852

SEQ ID NO: 2695 - protein, 14 aa, Human
WVRQAPGKGLEWVS

SEQ ID NO: 2696 - protein, 32 aa, Human
RFTISRDNAKNSLYLQMNSLRVEDTAVYYCAQ

SEQ ID NO: 2697 - protein, 11 aa, Human
WGQGTLVTVSS

SEQ ID NO: 2698 - protein, 152 aa, Human
EIVLTQSPATLSLSPGERATLSCRASQSVSSYLAWYQQKPGQAPRLLIYDAFNRATGIPARFSGSGSGTDFTLTISSLEPEDFAVYYCQQRSNWPRTFGGGTKVEIKRTVAAPSVFIFPPSDEQLKSGTASVVCLLNNFYPREAKVQWKVDN

SEQ ID NO: 2699 - protein, 107 aa, Human
EIVLTQSPATLSLSPGERATLSCRASQSVSSYLAWYQQKPGQAPRLLIYDAFNRATGIPARFSGSGSGTDFTLTISSLEPEDFAVYYCQQRSNWPRTFGGGTKVEIK

SEQ ID NO: 2700 - protein, 11 aa, Human
RASQSVSSYLA

SEQ ID NO: 2701 - protein, 7 aa, Human
DAFNRAT

SEQ ID NO: 2702 - protein, 9 aa, Human
QQRSNWPRT

SEQ ID NO: 2703 - protein, 23 aa, Human
EIVLTQSPATLSLSPGERATLSC

SEQ ID NO: 2704 - protein, 15 aa, Human
WYQQKPGQAPRLLIY

SEQ ID NO: 2705 - protein, 32 aa, Human; identical to SEQ ID NO: 215

SEQ ID NO: 2706 - protein, 10 aa, Human
FGGGTKVEIK

SEQ ID NO: 2707 - DNA, 441 bp, Human
caggtgcagctggtggagtctgggggaggcgtggtccagcctgggaggtccctgagactctcctgtgcagcctctggattcaccttcagtagctatggcatgcactgggtccgccaggctccaggcaaggggctggagtgggtggcagttatatcatatgatggaagtaataaatactatgcagactccgtgaagggccgattcaccatctccagagacaattccaagaacacgctgtatctgcaaatgaacagcctgagagctgaggacacggctgtgtattactgtgcgaaaggggattactatggttcggggagtcagtactactttgactactggggccagggaaccctggtcaccgtctcctcagggagtgcatccgccccaacccttttccccctcgtctcctgtgagaattccccgtcggatacgagcagcgtg

SEQ ID NO: 2708 - DNA, 453 bp, Human
gaggtgcagctggtggagtccgggggaggcttagttcagcctggggggtccctgagactctcctgtgcagcctctggattcaccttcagtagctactggatgcactgggtccgccaagctccagggaaggggctggtgtgggtctcacgtattaatagtgatgggagtagcacaagctacgcggactccgtgaagggccgattcaccatctccagagacaacgccaagaacacgctgtatctgcaaatgaacagtctgagagccgaggacacggctgtgtattactgtgcaagagtcgttcttacgtattactatgatagtagtggttatcagaatgcttttgatatctggggccaagggacaatggtcaccgtctcttcagggagtgcatccgccccaacccttttccccctcgtctcctgtgagaattccccgtcggatacgagcagcgtg

SEQ ID NO: 2709 - DNA, 407 bp, Human
caggtgcagctgcaggagtcgggcccaggactggtgaagccttcggagaccctgtccctcacctgcactgtctctggtggctccatcagtagttactactggagctggatccggcagcccccagggaagggactggagtggattgggtatatctattacagtgggagcaccaactacaacccctccctcaagagtcgagtcaccatatcagtagacacgtccaagaaccagttctccctgaagctgacctctgtgaccgctgcggacacggccgtgtattactgtgcgagatgtgccttactactagggaacgcttttgatatctggggccaagggacaatggtcaccgtctcttcagcttccaccaagggcccatcggtcttccccctggcgccctgctccaggag

SEQ ID NO: 2710 - DNA, 435 bp, Human
gaggtgcacctgttggagtctgggggaggcctggtacagcctggggggtccctgagactctcctgtgcagcctctggattcaccttcagcagctatgccatgagctgggtccgccagactccagggaaggggctggagtggatctcagctattactgccagtggttctgacacattccacgctgactccgtgaagggccggttcaccatctccagagacaattccaaggacacactgtatctgcaaatgaacagcctgagagtcgaggacacggccatatattactgtgcgaaaggctcttccaccgcccgcccctactactttgactactggggccagggaaccctggtcaccgtctcctcagggagtgcatccgccccaacccttttccccctcgtctcctgtgagaattccccgtcggatacgagcagcgtg

SEQ ID NO: 2711 - DNA, 446 bp, Human
gaggtgcagctggtgcagtctggagcagagatgaaaaagcccggggagtctctgaagatctcctgtaaggcttctggatactactttcccagctactggatcgcctgggtgcgccagatgcccgggagaggcctggaatggatggggatcatttatcctgttgactctgagaccacatacagcccgtccttccaaggccacgtcaccatctcagccgacaagtccatcagcaccgcctacctgcagtggagcagcctgaaggcctcggacaccgccatgtattactgtgcgagaccgaattactatggttcggggagccccccgggctactggggccagggaaccctggtcaccgtctcctcagggagtgcatccgccccaacccttttccccctcgtctcctgtgagaattccccgtcggatacgagcagcgtggccgttggctg

SEQ ID NO: 2712 - DNA, 543 bp, Human
gaggtgcagctggtgcagtctggagcagaggtgaaaaagcccggggagtctctgaagatctcctgtaagggttctggatacacctttaccaactactggatcggctgggtgcgccagatgcccgggaaaggcctggagtggatggggatcatctatcctggtgactcggataccagatacagcccgtccttccaaggccaggtcaccatctcagccgacaagtccatcagcaccgcctacctgcagtggagcagcctgaaggcctcggacaccgccatgtattactgtgcgagactgttttgtggtggtgactgcccgtttgactactggggccagggaaccctggtcaccgtctcctcagcctccaccaagggcccatcggtcttccccctggcgccctgctccaggagcacctctgggggcacagcggccctgggctgcctggtcaaggactacttccccgaaccggtgacggtgtcgtggaactcaggcgccctgaccagcggcgtgcacaccttcccggctgtcctacagtcctcagga

SEQ ID NO: 2713 - DNA, 435 bp, Human
gaggtgcaactgttggagtctgggggaggcttggtgcagccgggagggtccctgagactctcctgcgcagcctctggattcagctttagcaactacgccatgagctgggtccgccaggctccagggaaggggctggagtgggtctcagctgtttctggtaatggagttggcacattccacgcagactccgtgaagggccgcttcaccatctccagagacaattccaaggacacgttctatttgcaaatgagtggcctcacagtcgacgacacggccctatattattgtgtgaagggaagtgcagccgctcgcccctactactttgactactggggccagggaatcctggtcgccgtctcctcagggagtgcatccgccccaacccttttccccctcgtctcctgtgagaattccccgtcggatacgagcagcgtg

SEQ ID NO: 2714 - DNA, 432 bp, Human
gaggtgcagctggtggagtctgggggaggcttggtccagcctggggggtccctgagactctcctgtgcagcctctggattcacctttactatctattggatgagctgggtccgccaggctccagggaaggggctggagtgggtggccaacataaagcaagatggaagtgagaaatactatgtggactctgtgaagggccgattcaccatctccagagacaacgccaagaattcactgtatctgcaaatgaacagcctgagagccgaggacacggccgtgtattactgtgcgagagatggtatagcagtggctggtgggtttgactactggggccagggaaccctggtcaccgtctcctcagggagtgcatccgccccaacccttttccccctcgtctcctgtgagaattccccgtcggatacgagcagcgtg

SEQ ID NO: 2715 - DNA, 429 bp, Human
cagatcaccttgaaggagtctggtcctacgctggtgaaacccacacagaccctcacgctgacctgcaccttctctgggttctcactcagcactagtggagtgggtgtgggctggatccgtcagcccccaggaaaggccctggagtggcttgcactcatttattgggatgatgataagcgctacaggccatctctgaagagcaggctcagcatcaccaaggacacctccaaaaaccaggtggtccttacaatgaccaacatggaccctgtggacacagccacatattactgtgcacaccatcaccccatacttgattttgactactggggccagggaaccctggtcaccgtctcctcagggagtgcatccgccccaacccttttccccctcgtctcctgtgagaattccccgtcggatacgagcagcgtg

SEQ ID NO: 2716 - DNA, 469 bp, Human
caggtgcagctgcaggagtcgggcccaggactggtgaagccttcggagaccctgtccctcacctgcactgtctctggtggctccatcagtacttactactggagctggatccggcagcccgccgggaagggactggagtggattgggcgtatctataccagtgggagcaccaactacaacccctccctcaagagtcgggtcaccatgtcagtagacacgtccaagaaccagttctccctgaagctgagctctgtgaccgccgcggacacggccgtgtattactgtgcgagagaggttactatgatagtactgggatacaactggttcgacccctggggccagggaaccctggtcaccgtctcctctgcacccaccaaggctccggatgtgttccccatcatatcagggtgcagacacccaaaggataacagccctgtggtcctggcatgcttgataactgggtaccacc

SEQ ID NO: 2717 - DNA, 432 bp, Human
gaggtgcagctggtggagtctgggggaggcttggtccagcctggggggtccctgagactctcctgtgcagcctctggattcacctttagtagctattggatgagctgggtccgccaggctccagggaaggggctggagtgggtggccaacataaagcaagatggaagtgagaaatactatgtggcctctgtgaagggccgattcaccatctccagagacaacgccaagaactcactgtatctgcaaatgaacagcctgagagccgaggacacggccgtgtattactgtgcgagagatagtatagcagtggctgggggccttgactactggggccagggaaccctggtcaccgtctcctcagggagtgcatccgccccaacccttttccccctcgtctcctgtgagaattccccgtcggatacgagcagcgtg

SEQ ID NO: 2718 - DNA, 561 bp, Human
caggtgcagctggtggagtctgggggaggcttggtcaagcctggagggtccctgagactctcctgtgcagcctctggattcaccttcagtgactactacatgagctggatccgccaggctccagggaaggggctggagtgggtttcatacattagtattagtgatacgaccatatactacgcagacgctgtgcagggccgattcaccatgtccagggacaacgccaagaactcactgtatctgcaaatgaacagcctgaaggccgaggacacggccgtgtattactgtgcgagagctagcccatattgtggtggtgattgctctttcggcaatgcttttgatatctggggcctagggacaatggtcaccgtctcttcagcctccaccaagggcccatcggtcttccccctggcaccctcctccaagagcacctctgggggcacagcggccctgggctgcctggtcaaggactacttccccgaaccggtgacggtgtcgtggaactcaggcgccctgaccagcggcgtgcacaccttcccggctgtcctacagtcctcagga

SEQ ID NO: 2719 - DNA, 463 bp, Human
gaggtgcagctggtggagtctgggggaggcttggtccagcctggggggtccctgagactctcctgtgcagcctctggattcacctttagtagctattggatgagctgggtccgccaggctccagggaaggggctggagtgggtggccaacataaagcaagatggaagtgagaaatactatgtggactctgtgaagggccgattcaccatctccagagacaacgccaagaactcactgtatctgcaaatgaacagcctgagagccgaggacacggctgtgtattactgtgcgagagacggtatagcagtggctggtgggcttgactactggggccagggaaccctggtcaccgtctcctcagcacccaccaaggctccggatgtgttccccatcatatcagggtgcagacacccaaaggataacagccctgtggtcctggcatgcttgataactgggtaccacc

SEQ ID NO: 2720 - DNA, 546 bp, Human
caggtgcagttggtggagtctgggggaggcgtggtccagcctgggaggtccctgagactctcctgtgcagcctctggattcatcttcagtaacaatgctttgcactgggtccgccaggctccaggcaaggggctggagtgggtggcaattatatcatatgatggaagcaataaaaattatgcagcctccgtgaagggccgattcaccatctccagagacaattcccagaacacggtgtttctgcaaatgaacagcctgagagctgaagacacggctgtgtattactgtgcgagagatcatatagcaggagctgctaagtatttcgactactggggccagggaaccctggtcaccgtctcctcagcctccaccaagggcccatcggtcttccccctggcaccctcctccaagagcacctctgggggcacagcggccctgggctgcctggtcaaggactacttccccgaaccggtgacggtgtcgtggaactcaggcgccctgaccagcggcgtgcacaccttcccggctgtcctacagtcctcagga

SEQ ID NO: 2721 - DNA, 487 bp, Human
caggtgcagctgcaggagtcgggcccaggactggtgaagccttcacagaccctgtccctcacctgcactgtctctggtggctccatcagcagtggtagttactactggagctggatccggcagcccgccgggaagggactggagtggattgggcgtatctataccagtgggagcaccaactacaacccctccctcaagagtcgagtcaccatatcagtagacacgtccaagaaccagttctccctgaagctgagctctgtgaccgccgcagacacggccgtgtattactgtgcgagagagagtaaggtaactatggttcggggaggtctggcctactactacatggacgtctggggcaaagggaccacggtcaccgtctcctcagcacccaccaaggctccggatgtgttccccatcatatcagggtgcagacacccaaaggataacagccctgtggtcctggcatgcttgataactgggtaccacc

SEQ ID NO: 2722 - DNA, 540 bp, Human
gaggtgcagctggtggagtctgggggaggcttggtccagcctggggggtccctgagactctcctgtgcagcctctggattcacctttagtacctattggatgagctgggtccgccaggctccagggaaggggctggagtgggtggccaacataaagcaagatggaagtgagaagtactatgtggactctgtgaagggccgattcaccatctccagagacaacgccaagaactcactgtatctgcaaatgaacagcctgagagccgaggacacggccgtgtattactgtgcgtctaagctatggttacgtggaaactttgactactggggccagggaaccctggtcaccgtctcctcagcctccaccaagggcccatcggtcttccccctggcaccctcctccaagagcacctctgggggcacagcggccctgggctgcctggtcaaggactacttccccgaaccggtgacggtgtcgtggaactcaggcgccctgaccagcggcgtgcacaccttcccggctgtcctacagtcctcagga

SEQ ID NO: 2723 - DNA, 456 bp, Human
caggtgcagctggtggagtctgggggaggcgtggtccagcctgggaggtccctgagactctcctgtgcagcgtctggattcaccttcagtggctatggcatgcactgggtccgccaggctccaggcaaggggctggagtgggtggcagttatatggtttgatggaagtaataaatactatgcagactccgtgaagggccgattcaccatctccagagacaattccaagaacacgctgtatctgcaaatgaacagcctgagagccgaggacacggctgtctattactgtgcgagagatgcgcgttactatgatactagtggttatttagggacaacagagtttgactactggggccagggaaccctggtcaccgtctcctcagggagtgcatccgccccaacccttttccccctcgtctcctgtgagaattccccgtcggatacgagcagcgtggcc

SEQ ID NO: 2724 - DNA, 667 bp, Human
caggtgcagctggtggagtctgggggaggcgtggtccagcctgggaggtccctgagactctcctgtgcagcctctggattcaccttcaggagctatggcatgcactgggtccgccaggctccaggcaaggggctggagtgggtggcagttatatcatatgatggaagtaataaaaactatgcagactccgtgaagggccgactcaccatctccagagacaattccaagaacacgctgtatctgcaaatgaacagcctgagagctgaggacacggctgtgtattactgtgcgaaagatcggggtgggtatagcagtggctggacctactactactacggtatggacgtctggggccaagggaccacggtcaccgtctcctcagcctccaccaagggcccatcggtcttccccctggcaccctcctccaagagcacctctgggggcacagcggccctgggctgcctggtcaaggactacttccccgaaccggtgacggtgtcgtggaactcaggcgccctgaccagcggcgtgcacaccttcccggctgtcctacagtcctcaggactctactccctcagcagcgtggtgaccgtgccctccagcagcttgggcacccagacctacatctgcaacgtgaatcacaagcccagcaacaccaaggtggaca

SEQ ID NO: 2725 - DNA, 646 bp, Human
gaggtgcagctgttggagtctgggggaggcttggtacagcctggggggtccctgagactctcctgtgcagcctctggattcacctttagcagctatgccatgagctgggtccgccaggctccagggaaggggctggagtgggtctcagctattaggggtagtggtggtagcacatactacgcagactccgtgaagggccggttcaccatctccagagacaattccaagaacacactgtatctgcaaatgaacagcctgagagccgaggacacggccgtatattactgtgcgaaaggggtccgcagctcggatgactactttgagtactggggccagggaaccctggtcaccgtctcctcagcctccaccaagggcccatcggtcttccccctggcaccctcctccaagagcacctctgggggcacagcggccctgggctgcctggtcaaggactacttccccgaaccggtgacggtgtcgtggaactcaggcgccctgaccagcggcgtgcacaccttcccggctgtcctacagtcctcaggactctactccctcagcagcgtggtgaccgtgccctccagcagcttgggcacccagacctacatctgcaacgtgaatcacaagcccagcaacaccaaggtggaca

SEQ ID NO: 2726 - DNA, 435 bp, Human
gaggtgcagctggtgcagtctggagcagaggtgaaaaagcccggagagtctctgaagatctcctgtaagggttctggatactactttcccagctactggatcggctgggtgcgccagaagcccgggaatggcccggagtggatgggaatcatccatcctggtgactctgaaagcacatacagcccgtccttccaaggccaggtcaccatctcggccgacaagtccatcagcaccgcctacctgcagtggagcagcctgaaggcctcggacaccgccatgtattactgtgcgcgaccgttttactatggttcggagagtccccccggctactggggccagggaaccctggtcaccgtctcctcagggagtgcatccgccccaacccttttccccctcgtctcctgtgagaattccccgtcggatacgagcagcgtg

SEQ ID NO: 2727 - DNA, 407 bp, Human
cagctgcagctgcaggagtcgggcccaggactaatgaagccttcggagaccctgtccctcacctgcactgtctctggtggctccatcagcagaagcaattactactggggctggatccgccagcccccaggtaagggactggagtggattgggagtatctattatagtgggagcacctactacaacccctccctcaagagtcgagtcaccatatccgtagacacgtcccagaaccagttctccctgaagatgagctctgtgaccgccgcagacacggctgtttattactgtgcgagcctcttcgactacggtgacaactactggggccagggaaccctggtcaccgtctcctcagcctccaccaagggcccatcggtcttccccctggcaccctcctccaagagcac

SEQ ID NO: 2728 - DNA, 527 bp, Human
caggtgcagctggtgcagtctggggctgaggtgaagaagcctgggtcctcggtgaaggtctcctgcaaggcttctggaggcaccttcagcagctatgctatcagctgggtgcgacaggcccgtggacaagggcttgagtggatgggagggatcatccctatctttggtacagcaaactacccacagaagttccagggcagagtcacgattaccgcggacgaatccacgagcacagcctacatggagctgagcagcctgagatctgaggacacggccgtgtattactgtgcgagatatcacgcctatgatagtagtggctattacgttgactattggggccagggaaccctggtcaccgtctcctcagcatccccgaccagccccaaggtcttcccgctgagcctctgcagcacccagccagatgggaacgtggtcatcgcctgcctggtccagggcttcttcccccaggagccactcagtgtgacctggagcgaaagcggacagggcgtgaccgccagaaacttccc

SEQ ID NO: 2729 - DNA, 423 bp, Human
caggtgcagctgcaggagtcgggcccaggactggtgaagccttcggagaccctgtccctcacctgcactgtctctggtggctccatgagtagcagttactggagctggatccggcagcccccagggaagggactggagtggattggctatatctattacagagggagcaccaactacaacccctccctcaagactcgagtcaccatgtcagtagacacgtccaagaaccaattctcgatgaaaatgacctttatgaccgctgcggacacggccgtctattactgtgcgcgagaggcggcgttcaactggttcgactcctggggccagggaaccctggtcaccgtctcctcagggagtgcatccgccccaacccttttccccctcgtctcctgtgagaattccccgtcggatacgagcagcgtg

SEQ ID NO: 2730 - DNA, 432 bp, Human
gaggtgcagctggtggagtctgggggaggcttggtccagcctggggggtccctgagactctcctgtgcagcctctggattcaccttaagtatttattggatgagctgggtccgccaggctccagggaaggggctggagtgggtggccaacataaagcaagatggacgtgagaaataccatgtggactctgtgaagggccgattcaccatctccagagacaacgccaacaactcactgtatctgcaaatgaacaacctgagagccgaggacacggctgtgtatttctgtgcgagagatggtatagcagtggctggggggtttgactactggggccagggaaccctggtcaccgtctcctcagggagtgcatccgccccaacccttttccccctcgtctcctgtgagaattccccgtcggatacgagcagcgtg

SEQ ID NO: 2731 - DNA, 432 bp, Human
caggtgcagctggtggagtctgggggaggcgtggtccagcctgggaggtccctgagactctcctgtgcagcctctggattcaccttcagtagctatgctatgcactgggtccgccaggctccaggcaaggggctggagtgggtggcagttatatcatatgatggaggcaataaatactacgcagactccgtgaagggccgattcaccatctccagagacaattccaagaacacgctgtatctgcaaatgaacagcctgagagctgaggacacggctgtgtattactgtgcgagaggacatgggaactaccttacctactttgactactggggccagggaaccctggtcaccgtctcctcagggagtgcatccgccccaacccttttccccctcgtctcctgtgagaattccccgtcggatacgagcagcgtg

SEQ ID NO: 2732 - DNA, 620 bp, Human
gaggtgcagctggtggagtccgggggaggcttagttcagcctggggggtccctgagactctcctgtgcagcctctggattcaccttcagtagctcctggatacactgggtccgccaagctccagggaaggggctggtgtgggtctcacgtattaatagtgatgggagtagcacaacctacgcggactccgtgaagggccgattcaccatctccagagacaacgccaagaacacgctgtttctgcaaatgaacagtctgagagccgaggacacggctgtgtattactgtgcaagagcggagtggctacgcgggcagtttgactactggggccagggaaccctggtcaccgtctcctcaccacccaccaaggctccggatgtgttccccatcatatcagggtgcagacacccaaaggataacagccctgtggtcctggcatgcttgataactgggtaccacccaacgtccgtgactgtcacctggtacatggggacacagagccagccccagagaaccttccctgagatacaaagacgggacagctactacatgacaagcagccagctctccacccccctccagcagtggcgccaaggcgagtacaaatgcgtggtccagca

SEQ ID NO: 2733 - DNA, 656 bp, Human
gaggtgcagctggtgcagtctggagcagaggtgaaaaacccgggggagtctctgaagatctcctgtaagggttctggatacaggtttaccacctactggatcggctgggtgcgccagatgcccgggaaaggcctggagtggatggggatcatctatcctggtgactctgataccagatacagcccgtccttcgaaggccaggtcaccatctcagccgacaagtccatcagcaccgcctacctgcagtggagcagcctgaaggcctcggacaccgccatgtattactgtgcgaggcaccccctgggcttggggggaagtattgactactggggccagggaaccctggtcaccgtctcctcagcctccaccaagggcccatcggtcttccccctggcaccctcctccaagagcacctctgggggcacagcggccctgggctgcctggtcaaggactacttccccgaaccggtgacggtgtcgtggaactcaggcgccctgaccagcggcgtgcacaccttcccggctgtcctacagtcctcaggactctactccctcagcagcgtggtgaccgtgccctccagcagcttgggcacccagacctacatctgcaacgtgaatcacaagcccaccttggtgttgctgggcttgtgattcac

SEQ ID NO: 2734 - DNA, 455 bp, Human
caggtgcagttacagcagtggggcgcaggactgttgaagccttcggagaccctgtcccgcacctgcgctgtctatggtgggtccttcagtggttactactggagctggatccgccagaccccagggaaggggctggagtggattggggaaatcaatcatgatggaagcaccatctacaacccgtccctcaagagtcgagtcaccatatcgatagacacgtccaagaaccagttctccctgcaactgagctctgtgaccgccgcggacacggctgtgtactactgtgcgagagggtctaatcctggggactactggggccagggagccctggtcaccgtctcctcagcacccaccaaggctccggatgtgttccccatcatatcagggtgcagacacccaaaggataacagccctgtggtcctggcatgcttgataactgggtaccacccaacgtc

SEQ ID NO: 2735 - DNA, 540 bp, Human
caggtgcacctgcaggagtcgggcccaggactggtgaagccttcacagaccctgtccctcacttgcactgtctctggtgtctccatcaccactagtggctcctactggagctggatccgccagtgcccagggaagggcctggagtggattggatacatctattccactgggaccacctactacagtccgtccctcaagagtcgacttaccatatccctagacacgtctaggaaccaattctccctgaacctgagttctgtgactgccgcggacacggccgtgtttttctgtgctagaaaaacctacatggactactttgactactggggccagggagccctgatcaccgtctcctcagcctccaccaagggcccatcggtcttccccctggcaccctcctccaagagcacctctgggggcacagcggccctgggctgcctggtcaaggactacttccccgaaccggtgacggtgtcgtggaactcaggcgccctgaccagcggcgtgcacaccttcccggctgtcctacagtcctcagga

SEQ ID NO: 2736 - DNA, 485 bp, Human
gaggtgcagttgttggagtctgggggaggcttggtacagcctggggggtccctgagactctcctgtgcagcctctggattcaccttttacgactatgccatgaactgggtccgccagactccaggggaggggctggagtgggtctcagccattagtggcagtggtgatcccacatactacgcagactccgtgaacggccgcttcaccatctccagagacaattccaagaacacactgtatctgcaaatgaacagtctgagagccgaggatacggccatatattattgtgcgaaagacatggaggacttcggttttagttggggccagggaaccctggtcaccgtctcctcagcacccaccaaggctccggatgtgttccccatcatatcagggtgcagacacccaaaggataacagccctgtggtcctggcatgcttgataactgggtaccacccaacgtccgtgactgtcacctggtacatggg

SEQ ID NO: 2737 - DNA, 647 bp, Human
gacgtgcagctggtgcagtctggagcagaggtgacaaagccgggggagtctctgaagatctcctgtaagggttctggatacagctttaccacctactggatcggctgggtgcgccagatgcccgggaaaggcctggagtggatggggatcatctatcctggtgactctgataccagatacagcccgtccttccaaggccaggtcaccatctcagtcgacaagtccatcagcaccgcctacctgcagtggagcagcctgaaggcctcggacaccgccatgtattactgtgcgagacagttttgtggtggtgactgcccctttgactactggggccggggaaccctggtcaccgtctcctcagcttccaccaagggcccatcggtcttccccctggcgccctgctccaggagcacctctgggggcacagcggccctgggctgcctggtcaaggactacttccccgaaccggtgacggtgtcgtggaactcaggcgccctgaccagcggcgtgcacaccttcccggctgtcctacagtcctcaggactctactccctcagcagcgtggtgaccgtgccctccagcagcttgggcacccagacctacacctgcaacgtgaatcacaagcccagcaacaccaaggtggacaa

SEQ ID NO: 2738 - DNA, 644 bp, Human
caggtccagcttgtgcagtctggggctgaggtgaagaagcctggggcctcagtgaaggtttcctgcaaggcttctggatacaccttcactagatatggtatgcattgggtgcgccaggcccccggacaaaggcttaagtggatgggatggatcaacgctggcaatggtaacacaaaatattcacagaagttccagggcagactcaccattagcagggacacatccgcgagcacagcctacatggaggtgagcagtctgagatctgaagacacggctgtgtattactgtgcgagatcgggtatagcagcagctggtagtaaagtaatctactactacgatatggacgtctggggccaagggaccacggtcaccgtctcctcagcacccaccaaggctccggatgtgttccccatcatatcagggtgcagacacccaaaggataacagccctgtggtcctggcatgcttgataactgggtaccacccaacgtccgtgactgtcacctggtacatggggacacagagccagccccagagaaccttccctgagatacaaagacgggacagctactacatgacaagcagccagctctccacccccctccagcagtggcgccaaggcgagtacaaatgcgtggtccagca

SEQ ID NO: 2739 - DNA, 536 bp, Human
caggtgcaactggtgcagtctggggctgaggtgaagatgcctggggcctcagtgattgtttcctgcaaggcatctggatacaccttcagcacctactatattcactgggtgcgacaggcccctggacaagggcttgagtggatgggaagaatcaccccccgcgatggtgacacaacctacgcacaggtgttgcagggcagagtcacattgaccagggacacgtccgcgagcacagcctacatggagctgagcagcctgacatatgaggacacggccgtctattattgtgcgagagatggacatcactgggactttgacttctggggccggggaaccctggtcgccgtctcctcagcctccaccaagggcccatcggtcttccccctggcgccctgctccaggagcacctccgagagcacagcggccctgggctgcctggtcaaggactacttccccgaaccggtgacggtgtcgtggaactcaggcgccctgaccagcggcgtgcacaccttcccggctgtcctacagtcctcagg

SEQ ID NO: 2740 - DNA, 515 bp, Human
caggtgcagctgaagcagtctggggctgaggtgaaggagcccgggggctcagtgaagctttcctgcaaggcgtctggatacaccttcacctcccgctatatacactgggtgcgacaggcccctggacaagggcttgagtgggtgggaagacttattcccagtgacggtggcacaacctacgcacagaaatttcgcggcagagtcaccatgaccagcgacacgtccgcgaccacagcctacatggagctgagcagccttggatctggcgacacggccgtctattactgtgcgcgagacgggactcactgggactttgacttctggggccagggaaccctggtcaccgtctcctctgcatccccgaccagccccaaggtcttcccgctgagcctcgacagcaccccccaagatgggaacgtggtcgtcgcatgcctggtccagggcttcttcccccaggagccactcagtgtgacctggagcgaaagcggacagaacgtgaccgccagaaacttccc

SEQ ID NO: 2741 - DNA, 429 bp, Human; identical to SEQ ID NO: 1657

SEQ ID NO: 2742 - DNA, 534 bp, Human
caggtgcagctgcaggagtcgggcccaggactggtgaagccttcggggaccctgtccctcacctgctctgtctctggtggctccatcaatagttccttctggagctggatccggcagcccccagggaagggactggagtggattgggtatatctattaccgtgggagcaccaattacaacccctccctcaagagtcgagtcaccatatcagtggacacgtccaacaatcagttctccctgaagctgacctctatgaccgctgcggactcggccgtgtattactgtgcgcgagaaacccgatacaactggttcgactcctggggccagggaacccgggtcaccgtctcctcagcctccaccaagggcccatcggtcttccccctggcgccctgctccaggagcacctccgagagcacagcggccctgggctgcctggtcaaggactacttccccgaaccggtgacggtgtcgtggaactcaggcgccctgaccagcggcgtgcacaccttcccggctgtcctacagtcctcagga

SEQ ID NO: 2743 - DNA, 564 bp, Human
caggtccagctggtacagtctggggctgaggtgaagaagcctggggcctcagtgaaggtctcctgcaaggtttccggatacaccctcactgaattatccatgcactgggtgcggcaggctcctggaaaagggcttgagtggatgggaggttttgatcctgaagatgctgaaacaatctacgcacagaagttccagggcagagtcaccatgaccgaggacacatctacagacacagcctacatggagctgagcagcctgagatctgaggacacggccgtgtattactgtgcaacagggggctttcccgtcaatagcctttacgatattttgactggttaccttgactactggggccagggaaccctggtcaccgtctcctcagcctccaccaagggcccatcggtcttccccctggcgccctgctccaggagcacctccgagagcacagcggccctgggctgcctggtcaaggactacttccccgaaccggtgacggtgtcgtggaactcaggcgctctgaccagcggcgtgcacaccttcccagctgtcctacagtcctcagga

SEQ ID NO: 2744 - DNA, 500 bp, Human
caggtgcagttggtggagtctgggggaggcgtggtccagcctggaaggtccctgagactctcctgtgcagcgtctggattcaccttcagaaactttggcatgcactgggtccgccaggctccaggcaaggggctggagtgggtggcatttatatggactgctgaaagtgataaattctatgcagactccgtgaagggccgattcaccgtctccagagacaattcgaagaacacgctgtatttggaaatgaacagcctgagagccgaggacacggctgtgtattactgtacgaaagcgatggacgtctggggcagagggaccacggtcaccgtctcctcagcatccccgaccagccccaaggtcttcccgctgagcctctgcagcacccagccagatgggaacgtggtcatcgcctgcctggtccagggcttcttcccccaggagccactcagtgtgacctggagcgaaagcggacagggcgtgaccgccagaaacttccc

SEQ ID NO: 2745 - DNA, 447 bp, Human
caggtccagctggtacagtctggggctgaggtgaagaagcctggggcctcagtgaaggtctcctgcaaggtttccggatacaccctcactgaattatccatgcactgggtgcgacaggctcctggaaaagggcttgagtggatgggaggttttgatcctgaagatggtgaaacaatctacgcacagaagttccagggcagagtcaccatgaccgaagacacatctacagacacagcctacatggagctgagcagcctgagatctgaggacacggccgtgtattactgtgcaacagggggattgggttgttctaatggggtatgcaacaactggttcgacccctggggcctgggaaccctggtcaccgtctcctcagggagtgcatccgccccaacccttttccccctcgtctcctgtgagaattccccgtcggatacgagcagcgtg

SEQ ID NO: 2746 - DNA, 432 bp, Human
gaggtgcagctggtggagtctgggggaggcttggtccagcctggggggtccctgagactctcctgtgcagcctctggattcacctttagtagctattggatgagctgggtccgccaggctccagggaaggggctggagtgggtggccaacataaagcaagatggaagtgagaaatactatgtggactctgtgaagggccgattcaccatctccagagacaacgccaagaactcactgtatctgcaaatgaacagcctgagagccgaggacacggccgtgtattactgtgcgagggatagtatagcagtggctgggggctttgactactggggccagggaaccctggtcaccgtctcctcagggagtgcatccgccccaacccttttccccctcgtctcctgtgagaattccccgtcggatacgagcagcgtg

SEQ ID NO: 2747 - DNA, 432 bp, Human
caggtgcagctggtggagtctgggggaggcgtggtccagcctgggaggtccctgagactctcctgtgcagcgtctggattcaccttcagtagctatggcatgcactgggtccgccaggctccaggcaaggggctggagtgggtggcagttatatggtatgatggaagtaataaatactatgcagactccgtgaagggccgattcaccatctccagagacaattccaagaacacgctgtatctgcaaatgaacagcctgagagccgaggacacggctgtgtattactgtgcgaggatgcgtcctgaatattccagcgggttcgacccctggggccagggaaccctggtcaccgtctcctcagggagtgcatccgccccaacccttttccccctcgtctcctgtgagaattccccgtcggatacgagcagcgtg

SEQ ID NO: 2748 - DNA, 515 bp, Human
caggtgcagttggtgcagtctgggactgaggtgagggagcctggggcctcagtgaaagtctcctgcaaggcttctggatacaccttcaccggctactatgtgcactgggtgcggcaggcccctggacaaggacttgagtggatgggctgggtcaaccctggcagtggtgacacactctatgcacagaagtttcagggcaggttcaccttgaccagggacatgtccatcaccaccgcctacatggagctgagcagcctgagatctgacgactcggccgtttatttctgtttccgtggatacagctatgcaacctttgactactggggccagggaaccctggtcaccgtctcctcagcatccccgaccagccccaaggtcttcccgctgagcctctgcagcacccagccagatgggaacgtggtcatcgcctgcctggtccagggcttcttcccccaggagccactcagtgtgacctggagcgaaagcggacagggcgtgaccgccagaaacttccc

SEQ ID NO: 2749 - DNA, 542 bp, Human
caggtgcagctggtggagtctgggggaggcgtggtccagcctgggaggtccctgagactctcctgtgcagtctctggattcaccttcagtagctatgctatgcactgggtccgccaggctccaggcaaggggctggagtgggtggcagttatatcatatgatggaagcaataaatacttcgcagactccgtgaagggccgattcaccatctccagagacaattccaagaacacgctgtatctgcaaatgaacagcctgagagctgaggacacggctgtctattactgtgcgagaggacgtgggaactactttacctactttgactactggggccagggaaccctggtcaccgtctcctcagcctccaccaagggcccatcggtcttccccctggcaccctcctccaagagcacctctgggggcacagcggccctgggctgcctggtcaaggactacttccccgaaccggtgacggtgtcgtggaactcaggcgccctgaccagcggcgtgcacaccttcccggctgtcctacagtcctcagg

SEQ ID NO: 2750 - DNA, 441 bp, Human
caggtgcagctggtggagtctgggggaggcgtggtccagcctgggaggtccctgagactctcctgtgcagcctctggattcaccttcagtagctatggcatgcactgggtccgccaggctccaggcaaggggctggagtgggtggcagttatatcatatgatggaagtaataaatactatgcagactccgtgaagggccgattcaccatctccagagacaattccaagaacacgctgtatctgcaaatgaacagcctgagagctgaggacacggctgtgtattactgtgcgaaagagggtgggagctactcctactactactacggtatggacgtctggggccaagggaccacggtcaccgtctcctcagggagtgcatccgccccaacccttttccccctcgtctcctgtgagaattccccgtcggatacgagcagcgtg

SEQ ID NO: 2751 - DNA, 435 bp, Human
gaggtgcagttggtggagtctgggggagggttggtccagcctggggggtccctgagactctcctgtgtagtctctggattcacctttagtaggtattggatgagctgggtccgccagactccagggaaggggctgcagtgggtggctaacataaagcaagatgacactaacaaattctatgaagactctgtgaagggccgattcaccacctccagagacaacgccaagaactcactatatctgcaaatgaacagcctgagagccgaggacacggccgtctattactgtgcgagaggggggggcagctcgtccgggctctactttgagtcctggggccagggaaccctggtcatcgtctcctcagggagtgcatccgccccaacccttttccccctcgtctcctgtgagaattccccgtcggatacgagcagcgtg

SEQ ID NO: 2752 - DNA, 515 bp, Human
gaggtgcagctggtggagtctgggggagacttggtacagccagggcggtccctgagactctcctgtacagcttctgcattcaactttggtgattatgctatgagctgggtccgccaggctccagggaaggggctggagtgggtaggttttattagaagtaaaggttatggtgggacaacagaatacgccgcgtctgtgaaaggcagattcaccatctcaagagatgattccaatcgcatcgcctatctgcaaatgaacagcctgaaatccgaggacacagccgtatattactgtagtagagggtaccagctgccaaacttatggggccagggaaccctggtcaccgtctcctcagcatccccgaccagccccaaggtcttcccgctgagcctctgcagcacccagccagatgggaacgtggtcatcgcctgcctggtccagggcttcttcccccaggagccactcagtgtgacctggagcgaaagcggacagggcgtgaccgccagaaacttccc

SEQ ID NO: 2753 - DNA, 546 bp, Human
gaggtgcacctggtggagtctgggggaggctgggtccagcctggggggtccctgagactctcctgtgcagcctctggattcaccttgagtacctattggatgagctgggtccgccagactccaggggaggggctgcagtgggtggccaacataaagcaagatggaagttcgaaatactatgtggactctgtgaagggccgattcaccatttccagggacaacgccaagaactcagtatatctgcaaatgaacagcctgagaggcgaggacacggctgtgtattattgtgcgagaggggatgggagcaattccgggatttattttgactcctggggccagggaaccctggtcaccgtctcttcagcctccaccaagggcccatcggtcttccccctggcgccctgctccaggagcacctccgagagcacagcggccctgggctgcctggtcaaggactacttccccgaaccggtgacggtgtcgtggaactcaggcgctctgaccagcggcgtgcacaccttcccggctgtcctacagtcctcagga

SEQ ID NO: 2754 - DNA, 444 bp, Human
gaggtgcagctggtggagtctgggggaggcttggtacagcctggagggtccctgagactctcctgtgcagcctctggattcaccttcagtagttatgaaatgaactgggtccgccaggctccagggaaggggctggagtgggtttcatacattagtagtagtggtagtaccatatactacgcagactctgtgaagggccgattcaccatctccagagacaacgccaagaactcactgtatctgcaaatgaacagcctgagagccgaggacacggctgtttattactgtgcgagagatagacgtggggactacggccggtactactacggtatggacgtctggggccaagggaccacggtcaccgtctcctcagggagtgcatccgccccaacccttttccccctcgtctcctgtgagaattccccgtcggatacgagcagcgtg

SEQ ID NO: 2755 - DNA, 432 bp, Human
gaggtgcagctggtggagtctgggggaggcctggtcaagcctggggggtccctgagactctcctgtgcagcctctggattcaccttcagtagctatagcatgaactgggtccgccaggctccagggaaggggctggagtgggtctcatccattagtagtagtggtacttacatatactacgcagactcagtgaagggccgattcaccatctccagagacaacgccaagaactcactgtatctgcaaatgaacagcctgagagtcgaggacacggctgtgtattactgtgcccaaagtattgcagctcgtctcgactggttcgacccctggggccagggaaccctggtcaccgtctcctcagggagtgcatccgccccaacccttttccccctcgtctcctgtgagaattccccgtcggatacgagcagcgtg

SEQ ID NO: 2756 - DNA, 458 bp, Human
gacatccagatgacccagtctccttccaccctgtctgcatctgtaggagacagagtcaccatcacttgccgggccagtcagagtattagtagctggttggcctggtatcagcagaaaccagggaaagcccctaagctcctgatctatgatgcctccagtttggaaagtggggtcccatcaaggttcagcggcagtggatctgggacagaattcactctcaccatcagcagcctgcagcctgatgattttgcaacttattactgccaacagtataatagttattctcaaacttttggccaggggaccaagctggagatcaaacgaactgtggctgcaccatctgtcttcatcttcccgccatctgatgagcagttgaaatctggaactgcctctgttgtgtgcctgctgaataacttctatcccagagaggccaaagtacagtggaaggtggataacgc

SEQ ID NO: 2757 - DNA, 536 bp, Human
tcttctgagctgactcaggaccctgctgtgtctgtggccttgggacagacagtcaggatcacatgccaaggagacagcctcagaagctattatgcaagctggtaccagcagaagccaggacaggcccctgtacttgtcatctatggtaaaaacaaccggccctcagggatcccagaccgattctctggctccagctcaggaaacacagcttccttgaccatcactggggctcaggcggaagatgaggctgactattactgtaactcccgggacagcagtggtaacctcgtggtattcggcggagggaccaagctgaccgtcctaggtcagcccaaggctgccccctcggtcactctgttcccgccctcctctgaggagcttcaagccaacaaggccacactggtgtgtctcataagtgacttctacccgggagccgtgacagtggcctggaaggcagatagcagccccgtcaaggcgggagtggagaccaccaaaccctccaaacagagcaacaacaagtacgcggccagcagcta

SEQ ID NO: 2758 - DNA, 464 bp, Human
gacatccagatgacccagtctccatcttccgtgtctgcatctgtaggagacagagtcaccatcacttgtcgggcgagtcagggtattagcagctggttagcctggtatcagcagaaaccagggaaagcccctaagctcctgatctatgctgcattcagtttgcaaagtggggtcccatcaaggttcagcggcagtggatctgggacagatttcactctcaccatcagcagcctgcagcctgaagattttgcaacttactattgtcaacaggctaacagtttcccgcgggggctctctttcggcggagggaccaaggtggagatcaaacgaactgtggctgcaccatctgtcttcatcttcccgccatctgatgagcagttgaaatctggaactgcctctgttgtgtgcctgctgaataacttctatcccagagaggccaaagtacagtggaaggtggataacgc

SEQ ID NO: 2759 - DNA, 561 bp, Human
gaaattgtgttgacgcagtctccaggcaccctgtcgttgtctccaggagaaagagccaccctctcctgcagggccagtcagagtgttagcagcagccacttagcctggtaccagcagaaacctggccagtctcccaggctcctcatctatggtacatccaacagggccactggcatcccagacaggttcagtggcagtgggtctgggacagacttcactctcagcatcagcagactggagcctgaagattttgcagtgtattactgtcaagaatatggtagctcacggatgttcggccaagggaccaaggtggaaatcaaacgaactgtggctgcaccatctgtcttcatcttcccgccatctgatgagcagttgaaatctggaactgcctctgttgtgtgcctgctgaataacttctatcccagagaggccaaagtacagtggaaggtggataacgccctccaatcgggtaactcccaggagagtgtcacagagcaggacagcaaggacagcacctacagcctcagcagcaccctgacgctgagcaaagcagactacgag

SEQ ID NO: 2760 - DNA, 566 bp, Human
gaaattgtgttgacgcagtctccaggcaccctgtctttgtctccaggggaaagagccaccctctcctgcagggccagtcagggtgttagcagcaactacttagcctggtaccagcagaaacctggccaggctcccaggctcctcatctatggtgcatccagcagggccactggcatcccagacaggttcagtggcagtgggtctgggacagacttcactctcaccatcagcagactggagcctgaagattttgcagtgtattactgtcagcagtatggtaccacacctaatactttcggcggagggaccaaggtggagatcaaacgaactgtggctgcaccatctgtcttcatcttcccgccatctgatgagcagttgaaatctggaactgcctctgttgtgtgcctgctgaataacttctatcccagagaggccaaagtacagtggaaggtggataacgccctccaatcgggtaactcccaggagagtgtcacagagcaggacagcaaggacagcacctacagcctcagcagcaccctgacgctgagcaaagcagactacgagaa

SEQ ID NO: 2761 - DNA, 563 bp, Human
gacatccagatgacccagtctccttccaccctgtctgcatctgtaggagacagagtcaccatcacttgccgggccagtcagagtattagtagctggttggcctggtatcagcagaaaccagggaaagcccctaacctcctgatctatgatgcctccagtttggaaagtggggtcccatcaaggttcagcggcagtggatctgggacagaattcactctcaccatcagcagcctgcagcctgatgattttgcaacttattactgccaacagtataatacttacccaaggacgttcggccaagggaccaaggtggaaatcaaacgaactgtggctgcaccatctgtcttcatcttcccgccatctgatgagcagttgaaatctggaactgcctctgttgtgtgcctgctgaataacttctatcccagagaggccaaagtacagtggaaggtggataacgccctccaatcgggtaactcccaggagagtgtcacagagcaggacagcaaggacagcacctacagcctcagcagcaccctgacgctgagcaaagcagactacgagaa

SEQ ID NO: 2762 - DNA, 458 bp, Human
gaaattgtgttgacgcagtctccaggcaccctgtctttgtctccaggagaaagagccaccctctcctgcagggccagtcagactgttagcagcaactacttagcctggtaccagcagaaacctgcccagggtcccaggctcgtcatctatggtgcatccaacagggccactggcatcccagacaggttcagtggcagtgggtctgggacagacttcactctcaccatcagcagactggagcctgaagattttgcagtgtattactgtcagcagtatggtaattcaaggattttcggccaagggaccaaggtggagatcaaacgaactgtggctgcaccatctgtcttcatcttcccgccatctgatgagcagttgaaatctggaactgcctctgttgtgtgcctgctgaataacttctatcccagagaggccaaagtacagtggaaggtggataacgc

SEQ ID NO: 2763 - DNA, 530 bp, Human
tcctatgagctgactcagccaccctcagtgtccgtgtccccaggacagacagccagcatcacctgctctggagataaattgggggataaatatgcttgctggtatcagcagaagccaggccagtcccctgtgttggtcatctatcaagatagcaagcggccctcagggatccctgagcgattctctggctccaactctgggaacacagccactctgaccatcagcgggacccaggctatggacgaggctgactattactgtcaggcgtgggacagcagcaccgtggtattcggcggagggaccaagctgaccgtcctaggtcagcccaaggctgccccctcggtcactctgttcccgccctcctctgaggagcttcaagccaacaaggccacactggtgtgtctcataagtgacttctacccgggagccgtgacagtggcctggaaggcagatagcagccccgtcaaggcgggagtggagaccaccacaccctccaaacaaagcaacaacaagtacgcggccagcagcta

SEQ ID NO: 2764 - DNA, 536 bp, Human
tcctatgagctgactcagccaccctcagtgtccgtgtccccaggacagacagccagcatcacctgctctggagataaattgggggataaatatgcttgctggtatcagcagaagccaggccagtcccctgtgctggtcatctatcaagatagcaagcggccctcagggatccctgagcgattctctggctccaactctgggaacacagccactctgaccatcagcgggacccaggctatggatgaggctgactattactgtcaggcgtgggacagcagcactagggattatgtcttcggaactgggaccaaggtcaccgtcctaggtcagcccaaggccaaccccactgtcactctgttcccgccctcctctgaggagctccaagccaacaaggccacactagtgtgtctgatcagtgacttctacccgggagctgtgacagtggcctggaaggcagatggcagccccgtcaaggcgggagtggagaccaccaaaccctccaaacagagcaacaacaagtacgcggccagcagcta

SEQ ID NO: 2765 - DNA, 539 bp, Human
tcctatgtgctgactcagacaccctcggtgtcagtggccccaggacagacggccaggattacctgtgggggaaacaacattggaagtaaaagtgtgcactggtaccagcagaagccaggccaggcccctgtgctggtcgtccatgatgaaagcgaccggccctcagggatccctgagcgattttttggctccaactctgggaacacggccaccctgaccatcagcagggtcgaagccggggatgaggccgactattactgtcaggtgtgggatagtagtagtgatcatcttcatgtcttcggaactgggaccaaggtcaccgtcctaggtcagcccaaggccaaccccactgtcactctgttcccgccctcctctgaggagctccaagccaacaaggccacactagtgtgtctgatcagtgacttctacccgggagctgtgacagtggcctggaaggcagatggcagccccgtcaaggcgggagtggagaccaccaaaccctccaaacagagcaacaacaagtacgcggccagcagcta

SEQ ID NO: 2766 - DNA, 530 bp, Human
tcctatgagctgactcagccaccctcagtgtccgtgtccccaggacagacagccagcatcacctgctctggagataaattgggggataaatatgcttgctggtatcagcagaagccaggccagtcccctgtgctggtcatctatcaagatagcaagcggccctcagggatccctgagcgattctctggctccaactctgggaacacagccactctgaccatcagcgggacccaggctatggatgaggctgactatttctgtcaggcgtgggacagcagcactgtggtattcggcggagggaccaagctgaccgtcctacgtcagcccaaggctgccccctcggtcactctgttcccgccctcctctgaggagcttcaagccaacaaggccacactggtgtgtctcataagtgacttctacccgggagccgtgacagtggcctggaaggcagatagcagccccgtcaaggcgggagtggagaccaccacaccctccaaacaaagcaacaacaagtacgcggccagcagcta

SEQ ID NO: 2767 - DNA, 558 bp, Human
gacatccagatgacccagtctccttccaccctgtctgcatctgtaggagacagagtcaccatcacttgccgggccagtcagagtatttttagctggttggcctggtatcagcagaaaccagggaaagcccctaagctcctgatctatgatgcctccagtttggaaagtggggtcccatcaaggttcagcggcagtggatctgggacagaattcactctcaccatcagcagcctgcagcctgatgattttgcaacttattactgccaacagtataatagttattggacgttcggccaagggaccaaggtggaaatcaaacgaactgtggctgcaccatctgtcttcatcttcccgccatctgatgagcagttgaaatctggaactgcctctgttgtgtgcctgctgaataacttctatcccagagaggccaaagtacagtggaaggtggataacgccctccaatcgggtaactcccaggagagtgtcacagagcaggacagcaaggacagcacctacagcctcagcagcaccctgacgctgagcaaagcagactacgag

SEQ ID NO: 2768 - DNA, 530 bp, Human
tcctatgagctgactcagccaccctcagtgtccgtgtccccaggacagacagccagcatcacctgctctggagataaattgggggataaatatgcttgctggtatcagcagaagccaggccagtcccctgtgctggtcatctatcaagatagcaagcggccctcagggatccctgagcgattctctggctccaactctgggaacacagccactctgaccatcagcgggacccaggctatggatgaggctgactattactgtcaggcgtgggacagcagcactgtggtattcggcggagggaccaagctgaccgtcctaggtcagcccaaggctgccccctcggtcactctgttcccgccctcctctgaggagcttcaagccaacaaggccacactggtgtgtctcataagtgacttctacccgggagccgtgacagtggcctggaaggcagatagcagccccgtcaaggcgggagtggagaccaccacaccctccaaacaaagcaacaacaagtacgcggccagcagcta

SEQ ID NO: 2769 - DNA, 455 bp, Human
gacatccagatgacccagtctccatcctccctgtctgcatctgtaggagacagagtcaccatcacttgccgggcaagtcagagcattagcagctatttaaattggtatcagcagaaaccagggaaagcccctaagctcctgatctatgctgcatccagtttgcaaagtggggtcccatcaaggttcagtggcagtggatctgggacagatttcactctcaccatcagcagtctgcaacctgaagattttgcaacttactactgtcaacagagttacagtaagaacacttttggccaggggaccaagctggagatcaaacgaactgtggctgcaccatctgtcttcatcttcccgccatctgatgagcagttgaaatctggaactgcctctgttgtgtgcctgctgaataacttctatcccagagaggccaaagtacagtggaaggtggataacgc

SEQ ID NO: 2770 - DNA, 576 bp, Human
aattttatgctgactcagccccactctgtgtcggagtctccggggaagacggtaaccatctcctgcaccggcagcagtggcagcattgccagcaactatgtgcagtggtaccagcagcgcccgggcagtgcccccaccactgtgatctatgaggataaccaaagaccctctggggtccctgatcggttctctggctccatcgacagctcctccaactctgcctccctcaccatctctggactgaagactgaggacgaggctgactactactgtcagtcttatgatagcagcaatctagtgttcggcggagggaccaagctgaccgtcctaggtcagcccaaggctgccccctcggtcactctgttcccgccctcctctgaggagcttcaagccaacaaggccacactggtgtgtctcataagtgacttctacccgggagccgtgacagtggcctggaaggcagatagcagccccgtcaaggcgggagtggagaccaccacaccctccaaacaaagcaacaacaagtacgcggccagcagctacctgagcctgacgcctgagcagtggaagtcccac

SEQ ID NO: 2771 - DNA, 563 bp, Human
gaagtagtgctgacgcagtctccagccaccctgtctgtgtctccaggggaaagagccaccctctcctgcagggccagtcagagtgttagcagcaatttagcctggtatcagcagaaacctggccaggctcccaggctcctcatctatggtgcatccaccagggccactggtatcccagccaggttcagtggcagtgggtctgggacagagttcactctcaccatcagcagcctgcagtctgaagattttgcagtttattactgtcagcagtataataactggcctcggacgttcggccaagggaccaaggtggaaatcaaacgaactgtggctgcaccatctgtcttcatcttcccgccatctgatgagcagttgaaatctggaactgcctctgttgtgtgcctgctgaataacttctatcccagagaggccaaagtacagtggaaggtggataacgccctccaatcgggtaactcccaggagagtgtcacagagcaggacagcaaggacagcacctacagcctcagcagcaccctgacgctgagcaaagcagactacgagaa

SEQ ID NO: 2772 - DNA, 563 bp, Human; identical to SEQ ID NO: 2771

SEQ ID NO: 2773 - DNA, 563 bp, Human
gacatccagatgacccagtctccatcctccctgtctgcatctgtaggagacagagtcaccatcacttgccaggcgagtcaggacattagcaactatttaaattggtatcagcagaaaccagggaaagcccctaagctcctgatctacgatgcatccaatttggaaacaggggtcccatcaaggttcagtggaagtggatctgggacagattttactttcaccatcagcagcctgcagcctgaagatattgcaacatattactgtcaacaatatgataatctccccctcactttcggcggagggaccaaggtggagatcaaacgaactgtggctgcaccatctgtcttcatcttcccgccatctgatgagcagttgaaatctggaactgcctctgttgtgtgcctgctgaataacttctatcccagagaggccaaagtacagtggaaggtggataacgccctccaatcgggtaactcccaggagagtgtcacagagcaggacagcaaggacagcacctacagcctcagcagcaccctgacgctgagcaaagcagactacgagaa

SEQ ID NO: 2774 - DNA, 563 bp, Human
gacatccagatgacccagtctccttccaccctgtctgcatctgtaggagacagagtcaccatcacttgccgggccagtcagagtattactagctggttggcctggtatcagcagaaaccagggaaagcccctaagctcctgatctatgatgcctccagtttggaaagtggggtcccatcaaggttcagcggcagtggatctgggacagaattcactctcaccatcagcagcctgcagcctgatgattttgcaacttattactgccaacattataatagttatccttggacgttcggccaagggaccaaggtggaaatcaaacgaactgtggctgcaccatctgtcttcatcttcccgccatctgatgagcagttgaaatctggaactgcctctgttgtgtgcctgctgaataacttctatcccagagaggccaaagtacagtggaaggtggataacgccctccaatcgggtaactcccaggagagtgtcacagagcaggacagcaaggacagcacctacagcctcagcagcaccctgacgctgagcaaagcagactacgagaa

SEQ ID NO: 2775 - DNA, 464 bp, Human
gaaattgtgttgacgcagtctccaggcaccctgtctttgtctccaggggaaagagccaccctctcctgcagggccagtcagagtgttagcagcagctacttagcctggtaccagcagaaacctggccaggctcccagactcctcatctatggtgcatctagcagggccactggcatcccagacaggttcagtggcagtgggtctgggacagacttcactctcaccatcagcagactggaggctgaagattttgcagtatattactgtcagctctttggtagctcaccgacgtggacgttcggccaagggaccaaggtggaaatcaaacgaactgtggctgcaccatctgtcttcatcttcccgccatctgatgagcagttgaaatctggaactgcctctgttgtgtgcctgctgaataacttctatcccagagaggccaaagtacagtggaaggtggataacgc

SEQ ID NO: 2776 - DNA, 545 bp, Human
cagcttgtgctgactcaatcgccctctgcctctgcctccctgggagcctcggtcaagctcacctgcactctgagcagtgggcacagcagctacgccatcgcatggcatcagcagcagccagagaggggccctcggtacttgatgaagcttaacggtgatggcagccacagcaagggggacgggatccctgatcgcttctcaggctccagctctggggctgagcgctacctcaccatctccagcctccagtctgaagatgaggctgactattactgtcagacctggggcactgacattcaagtgttcggcggagggaccaagctgaccgtcctaggtcagcccaaggctgccccctcggtcactctgttcccgccctcctctgaggagcttcaagccaacaaggccacactggtgtgtctcataagtgacttctacccgggagccgtgacagtggcctggaaggcagatagcagccccgtcaaggcgggagtggagaccaccacaccctccaaacaaagcaacaacaagtacgcggccagcagcta

SEQ ID NO: 2777 - DNA, 464 bp, Human
gaaattgtgttgacacagtctccagccaccctgtctttgtctccaggggaaagagccaccctctcctgcagggccagtcagagtattagcagcttcttagcctggtaccaacagaaacctggccaggctcccaggctcctcatctatgatgcatccaacagggccactggcatcccagccaggttcagtggcagtgggtctgggacagacttcattctcaccatcaacaacctagagcctgaagattttgcagtttattactgtcagcagcgtagcaactggcctccgaagctcactttcggcggagggaccaaggtggagatcaaacgaactgtggctgcaccatctgtcttcatcttcccgccatctgatgagcagttgaaatctggaactgcctctgttgtgtgcctgctgaataacttctatcccagagaggccaaagtacagtggaaggtggataacgc

SEQ ID NO: 2778 - DNA, 458 bp, Human
gacatccagatgacccagtctccatcctcactgtctgcatctgtaggagacagagtcaccatcacttgtcgggcgagtcagggcattagcagttatttagcctggtttcagcagaaaccagggaaagcccctaagtccctgatctatgctgcatccagtttgcaaagtggggtcccatcaaagttcagcggcagtggatctgggacagatttcactctcaccatcagcagcctgcagcctgaagattttgcaacttattactgccaacagtataatagataccctcccactttcggcggagggaccaaggtggagatcaagcgaactgtggctgcaccatctgtcttcatcttcccgccatctgatgagcagttgaaatctggaactgcctctgttgtgtgcctgctgaataacttctatcccagagaggccaaagtacagtggaaggtggataacgc

SEQ ID NO: 2779 - DNA, 533 bp, Human
tcctatgagctgactcagccaccctcagtgtccgtgtccccaggacagacagccagcatcacctgctctggagataaattgggggatacatatgcttgctggtatcagcagaagccaggccagtcccctgtactggtcatctatcaagatagcaagcggccctcagggatccctgagcgattctctggctccaactctgggaacacagccactctgaccatcagcgggacccaggctatggatgaggctgactattactgtcaggcgtgggacagcagcacgtctgtggtattcggcggagggaccaagctgaccgtcctaggtcagcccaaggctgccccctcggtcactctgttcccgccctcctctgaggagcttcaagccaacaaggccacactggtgtgtctcataagtgacttctacccgggagccgtgacagtggcctggaaggcagatagcagccccgtcaaggcgggagtggagaccaccacaccctccaaacaaagcaacaacaagtacgcggccagcagcta

SEQ ID NO: 2780 - DNA, 461 bp, Human
gaaattgtgttgacgcagtctccaggcaccctgtctttgtctccaggggaaagagccaccctctcctgcagggccagtcagagtattagcagcaactacttagcctggtaccagcagaaacctggccaggctcccaggctcctcatctatggtgcatccagcagggccactggcatcccagacaggttcagtggcagtgggtctgggacagacttcactctcaccatcagcagactggagcctgaagattttgcagtgtattactgtcagcagtatggtagctcacctctcactttcggccctgggaccaaagtggatatcaaacgaactgtggctgcaccatctgtcttcatcttcccgccatctgatgagcagttgaaatctggaactgcctctgttgtgtgcctgctgaataacttctatcccagagaggccaaagtacagtggaaggtggataacgc

SEQ ID NO: 2781 - DNA, 580 bp, Human
aattttatgctgactcagccccactctgtgtcggagtctccggggaagacggtaaccatctcctgcaccggcagcagtggcagcattgccagcaactatgtgcagtggtaccagcagcgcccgggcagtgcccccaccactgtgatctatgaggataaccaaagaccctctggggtccctgatcggttctctggctccatcgacagctcctccaactctgcctccctcaccatctctggactgaagactgaggacgaggctgactactactgtcagtcttatgataccagcaatcatgtggtattcggcggagggaccaagctgaccgtcctaggtcagcccaaggctgccccctcggtcactctgttcccgccctcctctgaggagcttcaagccaacaaggccacactggtgtgtctcataagtgacttctacccgggagccgtgacagtggcctggaaggcagatagcagccccgtcaaggcgggagtggagaccaccacaccctccaaacaaagcaacaacaagtacgcggccagcagctacctgagcctgacgcctgagcagtggaagtcccaca

SEQ ID NO: 2782 - DNA, 560 bp, Human
gacatccagatgacccagtctccttccaccctgtctgcatctgtaggagacagagtcaccatcacttgccgggccagtcagagtattagtagctggttggcctggtatcagcagaaaccagggaaagcccctaagctcctgatctatgatgcctccagtttggaaagtggggtcccatcaaggttcagcggcagtggatctgggacagaattcactctcaccatcagcagcctgcagcctgatgactttgcaacttattactgccaacagtataatagtcattggacgttcggccaagggaccaaggtggaaatcaaacgaactgtggctgcaccatctgtcttcatcttcccgccatctgatgagcagttgaaatctggaactgcctctgttgtgtgcctgctgaataacttctatcccagagaggccaaagtacagtggaaggtggataacgccctccaatcgggtaactcccaggagagtgtcacagagcaggacagcaaggacagcacctacagcctcagcagcaccctgacgctgagcaaagcagactacgagaa

SEQ ID NO: 2783 - DNA, 565 bp, Human
tcctatgaactgactcagtcactctcagtgtcagtggccctgggacagacggccagaattccctgtgggggaaacaacattggaagtaaaaatgtgcactggtaccagcagaagccaggccaggcccctgtgctggtcatctacagcgatcgcaaccggccctctgggatccctgagcgattctcaggctccaactcggggaacacggccaccctgaccatcagcagagcccaagccggggatgaggctgactattactgtcaggtgtgggacagtagctctgtggtattcggcggagggaccaagctgaccgtcctacgtcagcccaaggctgccccctcggtcactctgttcccgccctcctctgaggagcttcaagccaacaaggccacactggtgtgtctcataagtgacttctacccgggagccgtgacagtggcctggaaggcagatagcagccccgtcaaggcgggagtggagaccaccacaccctccaaacaaagcaacaacaagtacgcggccagcagctatctgagcctgacgcctgagcagtggaagtcccaca

SEQ ID NO: 2784 - DNA, 570 bp, Human
cagtctgccctgactcagcctacctccgtgtctgggtctcctggacagtcgatcaccatctcctgcactggaaccagcagtgatgttgggcgttataaccttgtctcctggtaccaacagtacccaggcaaagcccccaaactcatcatttttgaggtcagtaagcggccctcaggggtctctgatcgcttctctgcctcaaagtctggcaacacggcctccctgacaatctctgggctccaggctgacgacgaggctgattattactgctgcacatatgctcttacatttttgttcggcggagggaccaaagtgaccgtcctaggtcagcccaaggctgccccctcggtcactctgttcccgccctcctctgaggagcttcaagccaacaaggccacactggtgtgtctcataagtgacttctacccgggagccgtgacagtggcctggaaggcagatagcagccccgtcaaggcgggagtggagaccaccacaccctccaaacaaagcaacaacaagtacgcggccagcagctatctgagcctgacgcctgagcagtggaagtcccac

SEQ ID NO: 2785 - DNA, 563 bp, Human
gacatccagatgacccagtctccatcctccctgtctgcatctgtaggagacagggtcaccatcacttgccggtcaggtcagagcattagcacctatttaaattggtatcagcagaaaccaggaaaagcccctaaactcctgatctatgcttcatccagtttgcaaagtggggtcccatcaaggttcagtggcagtggatctgggacagatttcactctcaccatcagcagtctgcaacctgaagattttgcaacttactactgtcaacagagtttccttccccctcgaacttttggccagggaaccaagctggagatcaaacgaactgtggctgcaccatctgtcttcatcttcccgccatctgatgagcagttgaaatctggaactgcctctgttgtgtgcctgctgaataacttctatcccagagaggccaaagtacagtggaaggtggataacgccctccaatcgggtaactcccaggagagtgtcacagagcaggacagcaaggacagcacctacagcctcagcagcaccctgacgctgagcaaagcagactacgagaa

SEQ ID NO: 2786 - DNA, 563 bp, Human
gacatccagatgacccagtctccttccaccctgtctgcatctgtaggagacagagtcaccatcacttgccgggccagtcagagtattagtagctggttggcctggtatcagcagaaaccagggaaagcccctaagctcctgatctatgatgcctccagtttggaaggtggggtcccatcaaggttcagcggcagtggatctgggacagaattcactctcaccatcagcagcctgcagcctgatgattttgcaacttattactgccaacagtataatagttatccccggacgttcggccaagggaccaaggtggaaatcaaacgaactgtggctgcaccatctgtcttcatcttcccgccatctgatgagcagttgaaatctggaactgcctctgttgtgtgcctgctgaataacttctatcccagagaggccaaagtacagtggaaggtggataacgccctccaatcgggtaactcccaggagagtgtcacagagcaggacagcaaggacagcacctacagcctcagcagcaccctgacgctgagcaaagcagactacgagaa

SEQ ID NO: 2787 - DNA, 566 bp, Human
gaaattgtgttgacgcagtctccaggcaccctgtctttgtctccaggggaaagagccaccctctcctgcagggccagtcagagagttagcagcagctacatagcctggtaccagcagaaacctggccaggctcccaggctcctcatctttggtacatccagcagggccactggcatcccagacaggttcagtggcagtgggtccgggacagacttcactctcaccatcagcagactggagcctgaagattttgcactgtattactgtcaacagtatggtagctcaccgtacacttttggccaggggaccaagctggagatcaaacgaactgtggctgcaccatctgtcttcatcttcccgccatctgatgagcagttgaaatctggaactgcctctgttgtgtgcctgctgaataacttctatcccagagaggccaaagtacagtggaaggtggataacgccctccaatcgggtaactcccaggagagtgtcacagagcaggacagcaaggacagcacctacagcctcagcagcaccctgacgctgagcaaagcagactacgagaa

SEQ ID NO: 2788 - DNA, 542 bp, Human
cactctgccctgactcagcctccctccgcgtctgggtctcctggacagtcagtcaccatttcctgcactggaaccagcagtgacgttggtggttataaccatgtctcctggtaccaacagcacccaggcaaagcccccaaattaatggtttatgaggtcaatcagcggccctcaggggtccctgatcgcttcactggctccaagtctggcaacacggcctccctgaccgtctctgggctccaggctgaggatgaggctgattattattgcaactcatatacagacaggaacaagtgggtgttcggcggagggaccaggctgaccgtcctaggtcagcccaaggctgccccctcggtcactctgttcccgccctcctctgaggagcttcaagccaacaaggccacactggtgtgtctcataagtgacttctacccgggagccgtgacagtggcctggaaggcagatagcagccccgtcaaggcgggagtggagaccaccacaccctccaaacaaagcaacaacaagtacgcggccagcagcta

SEQ ID NO: 2789 - DNA, 542 bp, Human
cactctgccctgactcagcctccctccgcgtctgggtctcctggacagtcagtcaccatttcctgcactggaaccagcgatgacgttggtggttataaccatgtctcctggtatcaacagcacccaggcaaagcccccaaattagtgatttatgaggtcactgagcggccctcaggggtccctgatcgcttcactggctccaagtctggcaacacggcctccctgaccgtctctgggctccaggctgaggatgaggctgattattactgcaactcatataaaaggggcaacacttgggtgttcggcggagggaccaggctgaccgtcctaggtcagcccaaggctgccccctcggtcactctgttcccgccctcctctgaggagcttcaagccaacaaggccacactggtgtgtctcataagtgacttctacccgggagccgtgacagtggcctggaaggcagatagcagccccgtcaaggcgggagtggagaccaccacaccctccaaacaaagcaacaacaagtacgcggccagcagcta

SEQ ID NO: 2790 - DNA, 560 bp, Human; identical to SEQ ID NO: 1747

SEQ ID NO: 2791 - DNA, 476 bp, Human
gacatcgtgatgacccagtctccagactccctggctgtgtctctgggcgagagggccaccatcaactgcaagtccagccagactgtttcatacacctccaacaataagaactacctagcttggtaccagcagaaaccaggacagcctcctaacctgctcatttactgggcatctacccgggaatccggggtccctgaccgattcagtggcagcgggtctgggacagatttcactctcaccatcaacagcctgcaggctgaagatgtggcagtttattactgtcagcaatattatactactccgtggacgttcggccaagggaccaaggtggaaatcaaacgaactgtggctgcaccatctgtcttcatcttcccgccatctgatgagcagttgaaatctggaactgcctctgttgtgtgcctgctgaataacttctatcccagagaggccaaagtacagtggaaggtggataacgc

SEQ ID NO: 2792 - DNA, 458 bp, Human
gaaatagtgatgacgcagtctccagccaccctgtctgtgtctccaggggaaagagccaccctctcctgcagggccagtcagaatgttagcagcaacttagcctggtaccaacagaaacctggccaggctcccaggctcctcatctatggtgcatccaccagggccactggtatcccggccaggttcagtggcagtgggtctgggacagagttcactctcaccatcagcagcctgcagtctgaagattttgcagtttattactgtcagcagtataataactggcctcacactttcggccctgggaccaaagtggatatcaaacgaactgtggctgcaccatctgtcttcatcttcccgccatctgatgagcagttgaaatctggaactgcctctgttgtgtgcctgctgaataacttctatcccagagaggccaaagtacagtggaaggtggataacgc

SEQ ID NO: 2793 - DNA, 458 bp, Human
gaaattgtgttgacacagtctccagccaccctgtctttgtctccaggggaaagagccaccctctcctgcagggccagtcagagtgttagcacctccttagcctggtaccaacagaaatgtggccaggctccccggctcctcatctatgatgcatccaacagggccactggcatcccagccaggttcagtggcagtgggtctgggacagacttcactctcaccatcagcagcctagagcctgaagattttgcagtttattactgtcaacagcgtggcaactggcccttcactttcggccctgggaccagagtggatatcaaacgaactgtggctgcaccatctgtcttcatcttcccgccatctgatgagcagttgaaatctggaactgcctctgttgtgtgcctgctgaataacttctatcccagagaggccaaagtacagtggaaggtggataacgc

SEQ ID NO: 2794 - DNA, 506 bp, Human
gaaatagtgatgacgcagtctccagccaccctgtctgtgtctccaggggaaagagccaccctctcctgcagggccagtcagagtattactagcaacttagcctggtaccagcagaaacctggccaggctcccaggctcctcatctatggtgcatccaccagggccactggtatcccagccaggttcagtggcagtgggtctgggacagagttcactctcaccatcagcaacctgcagtctgaagattttgcagtttattactgtcagcagtataataactggcctctgacgttcggccaagggaccaaggtggaaatcaaacgaactgtggctgcaccatctgtcttcatcttcccgccatctgatgagcagttgaaatctggaactgcctctgttgtgtgcctgctgaataacttctatcccagagaggccaaagtacagtggaaggtggataacgccctccaatcgggtaactcccaggagagtgtcacagagcaggacagcaa

SEQ ID NO: 2795 - DNA, 567 bp, Human
tcctatgagctgactcagccaccctcagtgtccgtgtccccaggacagacagccagcatcacctgctctggagataaattgggggataaatatgcttgctggtatcagcagaagccaggccagtcccctgtgctggtcatctatcaagatagcaagcggccctcagggatccctgagcgattctctggctccaactctgggaacacagccactctgaccatcagcgggacccaggctatggatgaggctgactattactgtcaggcgtgggacagcagcactaatgtggtattcggcggagggaccaagctgaccgtcctaggtcagcccaaggctgccccctcggtcactctgttcccgccctcctctgaggagcttcaagccaacaaggccacactggtgtgtctcataagtgacttctacccgggagccgtgacagtggcctggaaggcagatagcagccccgtcaaggcgggagtggagaccaccacaccctccaaacaaagcaacaacaagtacgcggccagcagctacctgagcctgacgcctgagcagtggaagtcccac

SEQ ID NO: 2796 - DNA, 571 bp, Human
cagtctgccctgactcagcctcgctcagtgtccgggtctcctggacagtcagtcaccatctcctgcactggaagcagcagtgatgttggtcgttataactatgtctcctggtaccagcaacacccaggcaaagcccccaaactcatgacttatgatgtcactaggcggccctcaggggtccctgctcgcttctctggctccaagtctgacaacacggcctccctgaccatctctgggctccaggctgaggatgaggccgattattattgttgctcatttgcaggcagctacactgtgttcggcggagggaccaaactgaccgtcctgggtcagcccaaggctgccccctcggtcactctgttcccgccctcctctgaggagcttcaagccaacaaggccacactggtgtgtctcataagtgacttctacccgggagccgtgacagtggcctggaaggcagatggcagccccgtcaaggtgggagtggagaccaccaaaccctccaaacaaagcaacaacaagtatgcggccagcagctacctgagcctgacgcccgagcagtggaagtccc

SEQ ID NO: 2797 - DNA, 551 bp, Human
cagtctgtgctgacgcagccgccctcagtgtctggggccccagggcagagggtcaccatctcctgcactgggagcagctccaacatcggggcaggttatgatgtacactggtaccagcagcttccaggaacagcccccaaactcctcatctatggtaacagcaatcggccctcaggggtccctgaccgattctctggctccaagtctggcacctcagcctccctggccatcactgggctccaggctgaggatgaggctgattattactgccagtcctatgacagcagcctgagtggttctttttatgtcttcggaactgggaccaaggtcaccgtcctaggtcagcccaaggccaaccccactgtcactctgttcccgccctcctctgaggagcttcaagccaacaaggccacactggtgtgtctcataagtgacttctacccgggagccgtgacagtggcctggaaggcagatagcagccccgtcaaggcgggagtggagaccaccacaccctccaaacaaagcaacaacaagtacgcggccagcagcta

SEQ ID NO: 2798 - DNA, 458 bp, Human
gaaattgtgttgacgcagtctccaggcaccctgtctttgtctccaggggaaagagccaccctctcctgcagggccagtcagagtgttagccgcaactacttagcctggtaccagcagaaacctggccaggctcccaggctcctcatctatagtgcatccagcagggccactggcatcccagacaggttcagtggcagtgggtctgggacagacttcactctcaccatcagcagactggagcctgaagattttgcagtgtattactgtcagcagtatggtggctcactcactttcggcggagggaccaaggtggagatcaaacgaactgtggctgcaccatctgtcttcatcttcccgccatctgatgagcagttgaaatctggaactgcctctgttgtgtgcctgctgaataacttctatcccagagaggccaaagtacagtggaaggtggataacgc

SEQ ID NO: 2799 - DNA, 458 bp, Human
gacatccagatgacccagtctccatcctccctgtctgcatctgtaggagacagagtcaccatcacttgccgggcgagtcagggcattagcaattatttagcctggtatcagcagaaaccagggaaagttcctaagctcctgatctatgctgcatccactttgcaatcaggggtcccatctcggttcagtggcagtggatctgggacagatttcactctcaccatcagcagcctgcagcctgaagatgttgcaacttattactgtcaaaagtataacagtgcccctcggactttcggccctgggaccaaagtggatatcaaacgaactgtggctgcaccatctgtcttcatcttcccgccatctgatgagcagttgaaatctggaactgcctctgttgtgtgcctgctgaataacttctatcccagagaggccaaagtacagtggaaggtggataacgc

SEQ ID NO: 2800 - DNA, 435 bp, Human; identical to SEQ ID NO: 2751

SEQ ID NO: 2801 - DNA, 458 bp, Human
gacatccagatgacccagtctccatcctccctgtctgcatctgtaggagacagagtcaccatcacttgccgggcaagccagagcattagcacctttttaaattggtatcagcagaaaccagggaaagcccctagtctcctgatctatgctgcatccagtttgcaaagtggggtcccatcaaggttcagtggcagtgaatctgggacagatttcactctcaccatcagcagtctgcaacctgaagattttgcaacttactactgtcaacagagttacagtaccccactcactttcggcggagggaccaaggtggagatcaaacgaactgtggctgcaccatctgtcttcatcttcccgccatctgatgagcagttgaaatctggaactgcctctgttgtgtgcctgctgaataacttctatcccagagaggccaaagtacagtggaaggtggataacgc

SEQ ID NO: 2802 - DNA, 560 bp, Human
gaaatagtgatgacgcagtctccagccaccctgtctgtgtctccaggggaaagagccaccctctcctgcagggccagtcagagtatcagcagcaaattagcctggtaccagcagaaacctggccaggctcccaggctcctcatctatggtgcgtccaccagggccactggtatcccagccaggttcagtggcagtgggtctgggacagaattcactctcaccatcagcagcatgcagtctgaagattttgcagtttattactgtcagcagtataattactggtacacttttggccaggggaccaagctggagatcaaacgaactgtggctgcaccatctgtcttcatcttcccgccatctgatgagcagttgaaatctggaactgcctctgttgtgtgcctgctgaataacttctatcccagagaggccaaagtacagtggaaggtggataacgccctccaatcgggtaactcccaggagagtgtcacagagcaggacagcaaggacagcacctacagcctcagcagcaccctgacgctgagcaaagcagactacgagaa

SEQ ID NO: 2803 - DNA, 533 bp, Human
tcttctgagctgactcaggaccctgctgtgtctgtggccttgggacagacagtcaggatcacatgccaaggagacagcctcagaagctattatgcaagctggtaccagcagaagccaggacaggcccctgtacttgtcatctatggtaaaaacaaccggccctcagggatcccagaccgattctctggctccagctcaggaaacacagcttccttgaccatcactggggctcaggcggaagatgaggctgactattactgtaactcccgggacagcagtggtaaccgggtgttcggcggagggaccaagctgaccgtcctaggtcagcccaaggctgccccctcggtcactctgttcccaccctcctctgaggagcttcaagccaacaaggccacactggtgtgtctcataagtgacttctacccgggagccgtgacagtggcctggaaggcagatagcagccccgtcaaggcgggagtggagaccaccacaccctccaaacaaagcaacaacaagtacgcggccagcagcta

SEQ ID NO: 2804 - DNA, 458 bp, Human
gaaattgtgttgacacagtctccagctaccctgtctttgtctccaggggaaagagccaccctctcctgcagggccagtcagagtgttagcagctacttagcctggtaccaacagaaacctggccaggctcccaggctcctcatctatgatgcattcaacagggccactggcatcccagccaggttcagtggcagtgggtctgggacagacttcactctcaccatcagcagcctagagcctgaagattttgcagtttattactgtcagcagcgtagcaactggcctcgcactttcggcggagggaccaaggtggagatcaaacgaactgtggctgcaccatctgtcttcatcttcccgccatctgatgagcagttgaaatctggaactgcctctgttgtgtgcctgctgaataacttctatcccagagaggccaaagtacagtggaaggtggataacgc

SEQ ID NO: 2805 - protein, 5 aa, Artificial Sequence
  Synthetic Polypeptide
GSGGS

SEQ ID NO: 2806 - protein, 4 aa, Artificial Sequence
  Synthetic Polypeptide
GGGS

SEQ ID NO: 2807 - protein, 4 aa, Artificial Sequence
  Synthetic Polypeptide
GGSG

SEQ ID NO: 2808 - protein, 5 aa, Artificial Sequence
  Synthetic Polypeptide
GGSGG

SEQ ID NO: 2809 - protein, 5 aa, Artificial Sequence
  Synthetic Polypeptide
GSGSG

SEQ ID NO: 2810 - protein, 5 aa, Artificial Sequence
  Synthetic Polypeptide
GSGGG

SEQ ID NO: 2811 - protein, 5 aa, Artificial Sequence
  Synthetic Polypeptide
GGGSG

SEQ ID NO: 2812 - protein, 5 aa, Artificial Sequence
  Synthetic Polypeptide
GSSSG

1. An antibody or antigen binding fragment comprising a heavy chain variable region and a light chain variable region, wherein the heavy chain variable region comprises a HCDR1, HCDR2, and HCDR3 having at least 80% sequence identity to the HCDR1, HCR2, HCR3 from a heavy chain variable region of a antibody clone of Table 1 and wherein the light chain variable region comprises a LCDR1, LCDR2, and LCDR3 having at least 80% sequence identity to the LCDR1, LCDR2, and LCDR3 from the light chain variable region of the same antibody clone of Table 1.

2. The antibody or antigen binding fragment of claim 1, wherein the heavy chain variable region comprises a HCDR1, HCDR2, and HCDR3 having the amino acid sequence of an of a HCDR1, HCDR2, and HCDR3 of a clone of Table 1 and wherein the light chain variable region comprises a LCDR1, LCDR2, and LCDR3 comprising the amino acid sequence of the LCDR1, LCDR2, and LCDR3 from the light chain variable region of the same clone of Table 1.

3. The antibody or antigen binding fragment of claim 1 or 2, wherein the HCDR1, HCDR2, HCDR2, LCDR1, LCDR2, and LCDR3 each comprise an amino acid sequence that has at least 80% sequence identity to an HCDR1, HCDR2, HCDR2, LCDR1, LCDR2, and LCDR3 of Table 1, wherein the HCDR1, HCDR2, HCDR2, LCDR1, LCDR2, and LCDR3 are from the same antibody clone.

4. The antibody or antigen binding fragment of claim 1 or 2, wherein the HCDR1, HCDR2, HCDR2, LCDR1, LCDR2, and LCDR3 each comprise the amino acid sequence of an HCDR1, HCDR2, HCDR2, LCDR1, LCDR2, and LCDR3 of Table 1, wherein the HCDR1, HCDR2, HCDR2, LCDR1, LCDR2, and LCDR3 are from the same antibody clone.

5. The antibody or antigen binding fragment of any one of claims 1-4, wherein the heavy chain variable region comprises an amino acid sequence with at least 80% sequence identity to a heavy chain variable region of an antibody clone of Table 1 and/or the light chain variable region comprises an amino acid sequence with at least 80% sequence identity to the light chain variable region of the same antibody clone of Table 1.

6. The antibody or antigen binding fragment of claim 5, wherein the heavy chain variable region comprises the amino acid sequence of a heavy chain variable region of an antibody clone of Table 1 and/or the light chain variable region comprises the amino acid sequence of the same antibody clone of Table 1.

7. The antibody or antigen binding fragment of any one of claims 1-6, wherein the antibody or antigen binding fragment comprises a heavy chain framework region (HFR) 1, HFR2, HFR3, and HFR4 and light chain framework region (LFR) 1, LFR2, LFR3, and LFR4, and wherein the HFR1, HFR2, HFR3, and HFR4 comprises an amino acid sequence with at least 80% sequence identity to an HFR1, HFR2, HFR3, and HFR4, respectively, of an antibody clone of Table 1, and the LFR1, LFR2, LFR3, and LFR4 comprises an amino acid sequence with at least 80% sequence identity to the LFR1, LFR2, LFR3, and LFR4, respectively, of the same antibody clone of Table 1.

8. The antibody or antigen binding fragment of any one of claims 1-6, wherein the HFR1, HFR2, HFR3, and HFR4 comprises the amino acid sequence of an HFR1, HFR2, HFR3, and HFR4, respectively, of an antibody clone of Table 1, and the LFR1, LFR2, LFR3, and LFR4 comprises the amino acid sequence of the LFR1, LFR2, LFR3, and LFR4, respectively, of the same antibody clone of Table 1.

9. The antibody or antigen binding fragment of any one of claims 1-8, wherein the antibody comprises a heavy chain and a light chain and wherein the heavy chain comprises an amino acid sequence with at least 70% sequence identity to a heavy chain of an antibody clone of Table 1 and the light chain comprises an amino acid sequence with at least 70% sequence identity to the light chain of the same antibody clone of Table 1.

10. The antibody or antigen binding fragment of claim 9, wherein the antibody comprises a heavy chain and a light chain and wherein the heavy chain comprises the amino acid sequence of an antibody clone of Table 1 and the light chain comprises the amino acid sequence of the same antibody clone of Table 1.

11. The antibody of any one of claims 1-10, wherein the antibody is human, chimeric, or humanized.

12. The antibody or antigen-binding fragment of any one of claims 1-11, wherein the antibody, or antigen binding fragment binds a SARS-CoV-2 protein with a K_{D} of about 10⁻⁶ nM to about 10⁻¹² pM.

13. The antibody or antigen binding fragment of any one of claims 1-12, wherein the antibody is a neutralizing antibody.

14. The antibody or antigen binding fragment of any one of claims 1-13, wherein the antibody is a human antibody, humanized antibody, recombinant antibody, chimeric antibody, an antibody derivative, a veneered antibody, a diabody, a monoclonal antibody, a single domain antibody, or a single chain antibody.

15. The antigen binding fragment of any one of claims 1-13, wherein the antigen binding fragment is a single chain variable fragment (scFv), F(ab′)₂, Fab′, Fab, Fv, or rIgG.

16. A polypeptide comprising the antigen binding fragment of any one of claims 1-15.

17. The polypeptide of claim 16, wherein the polypeptide comprises at least two antigen binding fragments, wherein each antigen binding fragment is independently selected from an antigen binding fragment of any one of claims 1-15.

18. The polypeptide of claim 16 or 17, wherein the polypeptide is multivalent.

19. The polypeptide of any one of claims 16-18, wherein the polypeptide is bispecific.

20. A composition comprising the antibody or antigen binding fragment of any one of claims 1-19.

21. The composition of claim 20, wherein the composition comprises a pharmaceutical excipient.

22. The composition of claim 20 or 21, wherein the composition further comprises an adjuvant.

23. The composition of any one of claims 20-22, wherein the composition is formulated for parenteral, intravenous, subcutaneous, intramuscular, or intranasal administration.

24. The composition of any one of claims 1-23, wherein the composition comprises at least two antibodies or antigen binding fragments.

25. One or more nucleic acids encoding the antibody or antigen binding fragment of any one of claims 1-15 or the polypeptide of claim 19.

26. A nucleic acid encoding an antibody heavy chain, wherein the nucleic acid has at least 70% sequence identity to one of SEQ ID NOS:1621-1710 or 2707-2755.

27. A nucleic acid encoding an antibody light chain, wherein the nucleic acid has at least 70% sequence identity to one of SEQ ID NOS:1711-1800 or 2756-2804.

28. A vector comprising the nucleic acid(s) of any one of claims 25-27.

29. A host cell comprising the nucleic acid of any one of claims 25-27 or the vector of claim 28.

30. The host cell of claim 29, wherein the host cell is a human cell, B cell, T cell, Chinese hamster ovary, NS0 murine myeloma cell, or PER.C6 cell.

31. A method of a making a cell comprising transferring the nucleic acid(s) of any one of claims 25-27 or the vector of claim 28 into a cell.

32. The method of claim 31, wherein the method further comprises culturing the cell under conditions that allow for expression of a polypeptide from the nucleic acid.

33. The method of claim 32, wherein the method further comprising isolating the expressed polypeptide.

34. The method of any one of claims 31-33, wherein the cell is a human cell, B cell, T cell, Chinese hamster ovary, NS0 murine myeloma cell, or PER.C6 cell.

35. A method for producing a polypeptide comprising transferring the nucleic acid(s) of any one of claims 25-27 or the vector of claim 28 into a cell and isolating polypeptides expressed from the nucleic acid.

36. The method of claim 35, wherein the cell is a human cell, B cell, T cell, Chinese hamster ovary, NS0 murine myeloma cell, or PER.C6 cell.

37. A method for treating or preventing a coronavirus infection in a subject, the method comprising administering to the subject, the antibody or antigen binding fragment of any one of claims 1-15, the polypeptide of claim 19, or the host cell of claim 29.

38. The method of claim 37, wherein the subject is a human subject.

39. The method of claim 37 or 38, wherein the coronavirus infection is SARS-CoV-2.

40. The method of claim 37 or 38, wherein the subject has one or more symptoms of a coronavirus infection.

41. The method of claim 37 or 38, wherein the subject does not have any symptoms of a coronavirus infection.

42. The method of any one of claims 37-41, wherein the subject has been diagnosed with a coronavirus infection.

43. The method of any one of claims 37-41, wherein the subject has not been diagnosed with a coronavirus infection.

44. The method of any one of claims 37-43, wherein the subject has been previously vaccinated for coronavirus.

45. The method of any one of claims 37-43, wherein the subject has not been previously vaccinated for coronavirus.

46. The method of any one of claims 37-45, wherein the antibody, antigen binding fragment, polypeptide, or cell is administered by parenteral, intravenous, subcutaneous, intramuscular, or intranasal administration.

47. The method of any one of claims 37-43, wherein the subject has been previously treated for a coronavirus infection.

48. The method of any one of claims 37-47, wherein the subject is administered an additional therapeutic.

49. The method of claim 48, wherein the additional therapeutic comprises a steroid or an anti-viral therapeutic.

50. The method of claim 49, wherein the additional therapeutic comprises dexamethasone or remdesivir.

51. A method for evaluating a sample from a subject, the method comprising contacting a biological sample from the subject, or extract thereof, with at least one antibody, antigen binding fragment, or polypeptide of any one of claims 1-19.

52. The method of claim 51, wherein the at least one antibody, antigen binding fragment, or polypeptide is operatively linked to a detectable label.

53. The method of claim 51 or 52, wherein the method further comprises incubating the antibody, antigen binding fragment, or polypeptide under conditions that allow for the binding of the antibody, antigen binding fragment, or polypeptide to antigens in the biological sample or extract thereof.

54. The method of any one of claims 51-53, wherein the method further comprises detecting the binding of an antigen to the antibody, antigen binding fragment, or polypeptide.

55. The method of any one of claims 51-54, wherein the method further comprises contacting the biological sample with at least one capture antibody, antigen, or polypeptide.

56. The method of claim 55, wherein the at least one capture antibody, antigen binding fragment, or polypeptide comprises at least one antibody of claims 1-19.

57. The method of claim 55 or 56, wherein the capture antibody is linked to a solid support.

58. The method of any one of claims 51-57, wherein the biological sample comprises a blood sample, urine sample, fecal sample, or nasopharyngeal sample.

59. A method for diagnosing a SARS-CoV-2 infection in a subject, the method comprising contacting a biological sample from the subject, or extract thereof, with at least one antibody, antigen binding fragment, or polypeptide of any one of claims 1-19.

60. The method of claim 59, wherein the at least one antibody, antigen binding fragment, or polypeptide is operatively linked to a detectable label.

61. The method of claim 59 or 60, wherein the method further comprises incubating the antibody, antigen binding fragment, or polypeptide under conditions that allow for the binding of the antibody, antigen binding fragment, or polypeptide to antigens in the biological sample or extract thereof.

62. The method of any one of claims 59-61, wherein the method further comprises detecting the binding of an antigen to the antibody, antigen binding fragment, or polypeptide.

63. The method of any one of claims 59-62, wherein the method further comprises contacting the biological sample with at least one capture antibody, antigen, or polypeptide.

64. The method of claim 63, wherein the at least one capture antibody, antigen, or polypeptide comprises at least one antibody, antigen, or polypeptide of claims 1-19.

65. The method of claim 63 or 64, wherein the capture antibody is linked to a solid support.

66. The method of any one of claims 59-65, wherein the biological sample comprises a blood sample, urine sample, fecal sample, or nasopharyngeal sample.
